(19) United States
(12) Patent Application Publication
(10) Pub. No.: US 2024/0392299 A1
(43) Pub. Date: Nov. 28, 2024

(54) TREATMENT OF MST1R RELATED DISEASES AND DISORDERS

(71) Applicant: Empirico Inc., San Diego, CA (US)

(72) Inventors: Omri GOTTESMAN, San Diego, CA (US); Shannon BRUSE, San Diego, CA (US); Paul BUSKE, Madison, WI (US); Brian CAJES, San Diego, CA (US); David JAKUBOSKY, San Diego, CA (US); Sarah KLEINSTEIN, San Diego, CA (US); David LEWIS, Madison, WI (US); David ROZEMA, Cross Plains, WI (US); John VEKICH, San Diego, CA (US)

(21) Appl. No.: 18/567,669

(22) PCT Filed: Jun. 14, 2022
(86) PCT No.: PCT/US2022/033350

§ 371 Date: Dec. 6, 2023

Related U.S. Application Data
(60) Provisional application No. 63/211,370, filed on Jun. 16, 2021.

(51) Int. Cl. C12N 15/113

(52) U.S. Cl. CPC C12N 15/1137; C12N 2310/11; C12N 2310/14; C12N 2310/321; C12N 2310/322; C12N 2310/351; C12Y 207/10001

(57) ABSTRACT

Disclosed herein are compositions comprising an oligonucleotide that targets MST1R. The oligonucleotide may include a small interfering RNA (siRNA) or an antisense oligonucleotide (ASO). Also provided herein are methods of treating conditions associated with MST1R mutations that include providing an oligonucleotide that targets MST1R to a subject.

### CROSS-REFERENCE

[0001] This application is a U.S. national stage entry of International Application No. PCT/US2022/033350, filed Jun. 14, 2022, which claims the benefit of U.S. Provisional Application No. 63/211,370, filed Jun. 16, 2021, which are incorporated herein by reference in their entirety.

### SEQUENCE LISTING

[0002] The instant application contains a Sequence Listing which has been submitted electronically in ASCII format and is hereby incorporated by reference in its entirety. Said ASCII copy, created on Jun. 2, 2022, is named 54462-731_831_SL.txt and is 2,357,478 bytes in size.

### BACKGROUND

[0003] Lung disorders are a common problem, and may affect a wide variety of persons. Improved therapeutics are needed for treating these disorders.

### SUMMARY

[0004] Described herein are compositions comprising an oligonucleotide that targets MST1R. Described herein are compositions comprising an oligonucleotide that targets MST1R and when administered to a subject in an effective amount reduces a MST1R mRNA level or MST1R protein level. Described herein are compositions comprising an oligonucleotide that targets MST1R and when administered to a subject in an effective amount increases a lung function measurement. In some embodiments, the lung function measurement comprises a forced expiratory volume in 1 second (FEV1) measurement, a forced expiratory volume in 1 second percent predicted (FEV1pp) measurement, a forced vital capacity (FVC) measurement, a FEV1/FVC ratio measurement, a forced expiratory volume, or a peak expiratory flow measurement. In some embodiments, the lung function measurement is increased by about 10% or more, as compared to prior to administration. Described herein are compositions comprising an oligonucleotide that targets MST1R and when administered to a subject in an effective amount decreases a leukocyte measurement. In some embodiments, the leukocyte measurement comprises a lung leukocyte measurement. In some embodiments, the leukocyte measurement comprises a circulating leukocyte measurement. In some embodiments, the leukocyte measurement comprises a neutrophil measurement, eosinophil measurement, basophil measurement, monocyte measurement, or lymphocyte measurement, or a combination thereof. In some embodiments, the leukocyte measurement is decreased by about 10% or more, as compared to prior to administration. Described herein are compositions comprising an oligonucleotide that targets MST1R and when administered to a subject in an effective amount decreases a chronic obstructive pulmonary disease (COPD) or asthma exacerbation measurement. In some embodiments, the COPD or asthma exacerbation measurement is decreased by about 10% or more, as compared to prior to administration. In some embodiments, the oligonucleotide comprises a modified internucleoside linkage. In some embodiments, the modified internucleoside linkage comprises alkylphosphonate, phosphorothioate, methylphosphonate, phosphorodithioate, alkylphosphonothioate, phosphoramidate, carbamate, carbonate, phosphate triester, acetamidate, or carboxymethyl ester, or a combination thereof. In some embodiments, the modified internucleoside linkage comprises one or more phosphorothioate linkages. In some embodiments, the oligonucleotide comprises 1, 2, 3, 4, 5, 6, 7, 8, 9, 10, 11, 12, 13, 14, 15, 16, 17, 18, 19, or 20 modified internucleoside linkages. In some embodiments, the oligonucleotide comprises a modified nucleoside. In some embodiments, the modified nucleoside comprises a locked nucleic acid (LNA), hexitol nucleic acid (HLA), cyclohexene nucleic acid (CeNA), 2′-methoxyethyl, 2′-O-alkyl, 2′-O-allyl, 2′-O-allyl, 2′-fluoro, or 2′-deoxy, or a combination thereof. In some embodiments, the modified nucleoside comprises a LNA. In some embodiments, the modified nucleoside comprises a 2′,4′ constrained ethyl nucleic acid. In some embodiments, the modified nucleoside comprises a 2′-O-methyl nucleoside, 2′-deoxyfluoro nucleoside, 2′-O—N-methylacetamido (2′-O-NMA) nucleoside, a 2′-O-dimethylaminoethoxyethyl (2′-O-DMAEOE) nucleoside, 2′-O-aminopropyl (2′-O-AP) nucleoside, or 2′-ara-F, or a combination thereof. In some embodiments, the modified nucleoside comprises one or more 2′fluoro modified nucleosides. In some embodiments, the modified nucleoside comprises a 2′ O-alkyl modified nucleoside. In some embodiments, the oligonucleotide comprises 1, 2, 3, 4, 5, 6, 7, 8, 9, 10, 11, 12, 13, 14, 15, 16, 17, 18, 19, 20, or 21 modified nucleosides. In some embodiments, the oligonucleotide comprises a lipid attached at a 3′ or 5′ terminus of the oligonucleotide. In some embodiments, the lipid comprises cholesterol, myristoyl, palmitoyl, stearoyl, lithocholoyl, docosanoyl, docosahexaenoyl, myristyl, palmityl stearyl, or α-tocopherol, or a combination thereof. In some embodiments, the oligonucleotide comprises a sugar moiety attached at a 3′ or 5′ terminus of the oligonucleotide. In some embodiments, the oligonucleotide comprises an integrin targeting ligand attached at a 3′ or 5′ terminus of the oligonucleotide. In some embodiments, the integrin comprises integrin alpha-v-beta-6. In some embodiments, the integrin targeting ligand comprises an arginine-glycine-aspartic acid (RGD) peptide. In some embodiments, the oligonucleotide comprises a small interfering RNA (siRNA) comprising a sense strand and an antisense strand. In some embodiments, the sense strand is 12-30 nucleosides in length. In some embodiments, the antisense strand is 12-30 nucleosides in length. Described herein are compositions comprising an oligonucleotide that inhibits the expression of MST1R, wherein the oligonucleotide comprises an siRNA comprising a sense strand and an antisense strand, each strand is independently about 12-30 nucleosides in length, and at least one of the sense strand and the antisense strand comprises a nucleoside sequence comprising about 12-30 contiguous nucleosides of SEQ ID NO: 9818. In some embodiments, any one of the following is true with regard to the sense strand: all purines comprise 2′ fluoro modified purines, and all pyrimidines comprise a mixture of 2′ fluoro and 2′ methyl modified pyrimidines; all purines comprise 2′ methyl modified purines, and all pyrimidines comprise a mixture of 2′ fluoro and 2′ methyl modified pyrimidines; all purines comprise 2′ fluoro modified purines, and all pyrimidines comprise 2′ methyl modified pyrimidines; all pyrimidines comprise 2′ fluoro modified pyrimidines, and all purines comprise a mixture of 2′ fluoro and 2′ methyl modified purines; all pyrimidines comprise 2′ methyl modified pyrimidines, and all purines comprise a mixture of 2′ fluoro and 2′ methyl modified purines; or all pyrimidines comprise 2′ fluoro modified pyrimidines, and all purines comprise 2′ methyl modified purines. In some embodiments, the sense strand comprises any one of modification patterns 1S, 2S, 3S, 4S, 5S, 6S, 7S, 8S, or 9S. In some embodiments, any one of the following is true with regard to the antisense strand: all purines comprise 2′ fluoro modified purines, and all pyrimidines comprise a mixture of 2′ fluoro and 2′ methyl modified pyrimidines; all purines comprise 2′ methyl modified purines, and all pyrimidines comprise a mixture of 2′ fluoro and 2′ methyl modified pyrimidines; all purines comprise 2′ methyl modified purines, and all pyrimidines comprise 2′ fluoro modified pyrimidines; all pyrimidines comprise 2′ fluoro modified pyrimidines, and all purines comprise a mixture of 2′ fluoro and 2′ methyl modified purines; all pyrimidines comprise 2′ methyl modified pyrimidines, and all purines comprise a mixture of 2′ fluoro and 2′ methyl modified purines; or all pyrimidines comprise 2′ methyl modified pyrimidines, and all purines comprise 2′ fluoro modified purines. In some embodiments, the antisense strand comprises any one of modification patterns 1AS, 2AS, 3AS, 4AS, 5AS, 6AS, 7AS, or 8AS. In some embodiments, the sense strand comprises the nucleic acid sequence of any one of SEQ ID NOs: 1-4754, and the antisense strand comprises the nucleic acid sequence of any one of SEQ ID NOs: 4755-9508. In some embodiments, the oligonucleotide comprises an antisense oligonucleotide (ASO). In some embodiments, the ASO is 12-30 nucleosides in length. Described herein are compositions comprising an oligonucleotide that inhibits the expression of MST1R, wherein the oligonucleotide comprises an ASO about 12-30 nucleosides in length and a nucleoside sequence complementary to about 12-30 contiguous nucleosides of SEQ ID NO: 9818. Some embodiments include a pharmaceutically acceptable carrier. Described herein are methods of treating a subject having a lung disorder, comprising administering an effective amount of the composition to the subject. In some embodiments, the lung disorder COPD, acute exacerbation of COPD, emphysema, chronic bronchitis, asthma, status asthmaticus, asthma-COPD overlap syndrome (ACOS), cough, lung cancer, interstitial lung disease, or pulmonary fibrosis.

### DETAILED DESCRIPTION

[0005] Large-scale human genetic data can improve the success rate of pharmaceutical discovery and development. A Genome Wide Association Study (GWAS) may detect associations between genetic variants and traits in a population sample. A GWAS may enable better understanding of the biology of disease, and provide applicable treatments. A GWAS can utilize genotyping and/or sequencing data, and often involves an evaluation of millions of genetic variants that are relatively evenly distributed across the genome. The most common GWAS design is the case-control study, which involves comparing variant frequencies in cases versus controls. If a variant has a significantly different frequency in cases versus controls, that variant is said to be associated with disease. Association statistics that may be used in a GWAS are p-values, as a measure of statistical significance; odds ratios (OR), as a measure of effect size; or beta coefficients (beta), as a measure of effect size. Researchers often assume an additive genetic model and calculate an allelic odds ratio, which is the increased (or decreased) risk of disease conferred by each additional copy of an allele (compared to carrying no copies of that allele). An additional concept in design and interpretation of GWAS is that of linkage disequilibrium, which is the non-random association of alleles. The presence of linkage disequilibrium can obfuscate which variant is “causal.”

[0006] Functional annotation of variants and/or wet lab experimentation can identify the causal genetic variant identified via GWAS, and in many cases may lead to the identification of disease-causing genes. In particular, understanding the functional effect of a causal genetic variant (for example, loss of protein function, gain of protein function, increase in gene expression, or decrease in gene expression) may allow that variant to be used as a proxy for therapeutic modulation of the target gene, or to gain insight into potential therapeutic efficacy and safety of a therapeutic that modulates that target.

[0007] Identification of such gene-disease associations has provided insights into disease biology and may be used to identify novel therapeutic targets for the pharmaceutical industry. In order to translate the therapeutic insights derived from human genetics, disease biology in patients may be exogenously ‘programmed’ into replicating the observation from human genetics. There are several potential options for therapeutic modalities that may be brought to bear in translating therapeutic targets identified via human genetics into novel medicines. These may include well established therapeutic modalities such as small molecules and monoclonal antibodies, maturing modalities such as oligonucleotides, and emerging modalities such as gene therapy and gene editing. The choice of therapeutic modality can depend on several factors including the location of a target (for example, intracellular, extracellular, or secreted), a relevant tissue (for example, lung) and a relevant indication.

[0008] The MST1R (macrophage-stimulating 1 receptor) gene is located on chromosome 3, and encodes macrophage-stimulating 1 receptor (MST1R), also known as macrophage-stimulating protein receptor or Recepteur d'Origine Nantais (RON) kinase. The MST1R gene may encode various transcripts or splice variants. MST1R may include 1400 amino acids and have a mass of about 152 kDa. MST1R may be cleaved into an alpha and beta chain. MST1R may comprise a receptor tyrosine kinase that transduces signals from the extracellular matrix into the cytoplasm by binding macrophage-stimulating protein (MSP) encoded by MST1 (macrophage-stimulating 1). MSP may also be referred to as MST1 protein. MST1R may be intracellular. MST1R may be cell membrane-bound. MST1R may be expressed in lungs. MST1R may bind or interact with MSP and stimulate lung ciliary motility. The MSP may be secreted by the liver and enter the bloodstream prior to interacting with MST1R at the lung. An example of an MST1R amino acid sequence, and further description of MST1R is included at uniprot.org under accession no. Q04912 (last modified Mar. 28, 2018).

[0009] Here, it is shown that a genetic variant that may result in loss of function of the MST1R gene in humans are associated with decreased risk of chronic obstructive pulmonary disease (COPD), family history of COPD, asthma, and use of inhaled beta agonist medication. Also shown is that genetic variants that may result in loss of function of the gene encoding MST1R's binding partner, MST1, are also associated with decreased risk of COPD, family history of COPD, asthma, and use of inhaled beta agonist medication. Therefore, inhibition of MST1R may serve as a therapeutic strategy for treatment of a lung disorder such as COPD, acute exacerbation of COPD, emphysema, chronic bronchitis, asthma, status asthmaticus, asthma-COPD overlap syndrome (ACOS), cough, lung cancer, interstitial lung disease, or pulmonary fibrosis.

[0010] Disclosed herein, are methods or compositions that inhibit or target MST1R. Where inhibition or targeting of MST1R is disclosed, it is contemplated that some embodiments may include inhibiting or targeting a MST1R protein or MST1R RNA. For example, by inhibiting or targeting an RNA (e.g. mRNA) encoded by the MST1R gene using an oligonucleotide described herein, the MST1R protein may be inhibited or targeted as a result of there being less production of the MST1R protein by translation of the MST1R RNA; or a MST1R protein may be targeted or inhibited by an oligonucleotide that binds or interacts with a MST1R RNA and reduces production of the MST1R protein from the MST1R RNA. Thus, targeting MST1R may refer to binding a MST1R RNA and reducing MST1R RNA or MST1R protein levels. The oligonucleotide may include a small interfering RNA (siRNA) or an antisense oligonucleotide (ASO). Also provided herein are methods of treating a lung disorder by providing an oligonucleotide that targets MST1R to a subject in need thereof.

### I. COMPOSITIONS

[0011] Disclosed herein, in some embodiments, are compositions comprising an oligonucleotide. In some embodiments, the composition comprises an oligonucleotide that targets MST1R. In some embodiments, the composition consists of an oligonucleotide that targets MST1R. In some embodiments, the oligonucleotide reduces MST1R mRNA expression in the subject. In some embodiments, the oligonucleotide reduces MST1R protein expression in the subject. The oligonucleotide may include a small interfering RNA (siRNA) described herein. The oligonucleotide may include an antisense oligonucleotide (ASO) described herein. In some embodiments, a composition described herein is used in a method of treating a disorder in a subject in need thereof. Some embodiments relate to a composition comprising an oligonucleotide for use in a method of treating a disorder as described herein. Some embodiments relate to use of a composition comprising an oligonucleotide, in a method of treating a disorder as described herein.

[0012] Some embodiments include a composition comprising an oligonucleotide that targets MST1R and when administered to a subject in an effective amount decreases MST1R mRNA or MST1R protein levels in a cell, fluid or tissue. In some embodiments, the composition comprises an oligonucleotide that targets MST1R and when administered to a subject in an effective amount decreases MST1R mRNA levels in a cell or tissue. In some embodiments, the cell is a lung cell, lung epithelial cell, type I or II alveolar cell, macrophage, alveolar macrophage, goblet cell, club cell, or fibroblast. In some embodiments, the tissue is lung tissue. In some embodiments, the MST1R mRNA levels are decreased by about 2.5% or more, about 5% or more, or about 7.5% or more, as compared to prior to administration. In some embodiments, the MST1R mRNA levels are decreased by about 10% or more, as compared to prior to administration. In some embodiments, the MST1R mRNA levels are decreased by about 20% or more, about 30% or more, about 40% or more, about 50% or more, about 60% or more, about 70% or more, about 80% or more, about 90% or more, or about 100%, as compared to prior to administration. In some embodiments, the MST1R mRNA levels are decreased by no more than about 2.5%, no more than about 5%, or no more than about 7.5%, as compared to prior to administration. In some embodiments, the MST1R mRNA levels are decreased by no more than about 10%, as compared to prior to administration. In some embodiments, the MST1R mRNA levels are decreased by no more than about 20%, no more than about 30%, no more than about 40%, no more than about 50%, no more than about 60%, no more than about 70%, no more than about 80%, or no more than about 90%, as compared to prior to administration. In some embodiments, the MST1R mRNA levels are decreased by 2.5%, 5%, 7.5%, 10%, 15%, 20%, 25%, 30%, 35%, 40%, 45%, 50%, 55%, 60%, 65%, 70%, 75%, 80%, 85%, 90%, 95%, or 100%, or by a range defined by any of the two aforementioned percentages.

[0013] In some embodiments, the composition comprises an oligonucleotide that targets MST1R and when administered to a subject in an effective amount decreases MST1R protein levels in a cell or tissue. In some embodiments, the cell is a lung cell, lung epithelial cell, type I or II alveolar cell, macrophage, alveolar macrophage, goblet cell, club cell, or fibroblast. In some embodiments, the tissue is lung tissue. In some embodiments, the MST1R protein levels are decreased by about 2.5% or more, about 5% or more, or about 7.5% or more, as compared to prior to administration. In some embodiments, the MST1R protein levels are decreased by about 10% or more, as compared to prior to administration. In some embodiments, the MST1R protein levels are decreased by about 20% or more, about 30% or more, about 40% or more, about 50% or more, about 60% or more, about 70% or more, about 80% or more, about 90% or more, or about 100%, as compared to prior to administration. In some embodiments, the MST1R protein levels are decreased by no more than about 2.5%, no more than about 5%, or no more than about 7.5%, as compared to prior to administration. In some embodiments, the MST1R protein levels are decreased by no more than about 10%, as compared to prior to administration. In some embodiments, the MST1R protein levels are decreased by no more than about 20%, no more than about 30%, no more than about 40%, no more than about 50%, no more than about 60%, no more than about 70%, no more than about 80%, or no more than about 90%, as compared to prior to administration. In some embodiments, the MST1R protein levels are decreased by 2.5%, 5%, 7.5%, 10%, 15%, 20%, 25%, 30%, 35%, 40%, 45%, 50%, 55%, 60%, 65%, 70%, 75%, 80%, 85%, 90%, 95%, or 100%, or by a range defined by any of the two aforementioned percentages.

[0014] In some embodiments, the composition comprises an oligonucleotide that targets MST1R and when administered to a subject in an effective amount diminishes an adverse phenotype of lung disorder in the subject. The lung disorder may include chronic obstructive pulmonary disease (COPD), acute exacerbation of COPD, emphysema, chronic bronchitis, asthma, status asthmaticus, asthma-COPD overlap syndrome (ACOS), cough, lung cancer, interstitial lung disease, or pulmonary fibrosis. In some embodiments, the adverse phenotype is decreased by about 2.5% or more, about 5% or more, or about 7.5% or more, as compared to prior to administration. In some embodiments, the adverse phenotype is decreased by about 10% or more, as compared to prior to administration. In some embodiments, the adverse phenotype is decreased by about 20% or more, about 30% or more, about 40% or more, about 50% or more, about 60% or more, about 70% or more, about 80% or more, about 90% or more, or about 100%, as compared to prior to administration. In some embodiments, the adverse phenotype is decreased by no more than about 2.5%, no more than about 5%, or no more than about 7.5%, as compared to prior to administration. In some embodiments, the adverse phenotype is decreased by no more than about 10%, as compared to prior to administration. In some embodiments, the adverse phenotype is decreased by no more than about 20%, no more than about 30%, no more than about 40%, no more than about 50%, no more than about 60%, no more than about 70%, no more than about 80%, or no more than about 90%, as compared to prior to administration. In some embodiments, the adverse phenotype is decreased by 2.5%, 5%, 7.5%, 10%, 15%, 20%, 25%, 30%, 35%, 40%, 45%, 50%, 55%, 60%, 65%, 70%, 75%, 80%, 85%, 90%, 95%, or 100%, or by a range defined by any of the two aforementioned percentages.

[0015] In some embodiments, the composition comprises an oligonucleotide that targets MST1R and when administered to a subject in an effective amount enhances a protective phenotype of a lung disorder. The lung disorder may include chronic obstructive pulmonary disease (COPD), acute exacerbation of COPD, emphysema, chronic bronchitis, asthma, status asthmaticus, asthma-COPD overlap syndrome (ACOS), cough, lung cancer, interstitial lung disease, or pulmonary fibrosis. In some embodiments, the protective phenotype is increased by about 2.5% or more, about 5% or more, or about 7.5% or more, as compared to prior to administration. In some embodiments, the protective phenotype is increased by about 10% or more, as compared to prior to administration. In some embodiments, the protective phenotype is increased by about 20% or more, about 30% or more, about 40% or more, about 50% or more, about 60% or more, about 70% or more, about 80% or more, about 90% or more, or about 100% or more, as compared to prior to administration. In some embodiments, the protective phenotype is increased by about 200% or more, about 300% or more, about 400% or more, about 500% or more, about 600% or more, about 700% or more, about 800% or more, about 900% or more, or about 1000% or more, as compared to prior to administration. In some embodiments, the protective phenotype is increased by no more than about 2.5%, no more than about 5%, or no more than about 7.5%, as compared to prior to administration. In some embodiments, the protective phenotype is increased by no more than about 10%, as compared to prior to administration. In some embodiments, the protective phenotype is increased by no more than about 20%, no more than about 30%, no more than about 40%, no more than about 50%, no more than about 60%, no more than about 70%, no more than about 80%, no more than about 90%, or no more than about 100%, as compared to prior to administration. In some embodiments, the protective phenotype is increased by no more than about 200%, no more than about 300%, no more than about 400%, no more than about 500%, no more than about 600%, no more than about 700%, no more than about 800%, no more than about 900%, or no more than about 1000%, as compared to prior to administration. In some embodiments, the protective phenotype is increased by 2.5%, 5%, 7.5%, 10%, 15%, 20%, 25%, 30%, 35%, 40%, 45%, 50%, 55%, 60%, 65%, 70%, 75%, 80%, 85%, 90%, 95%, 100%, 150%, 200%, 250%, 300%, 400%, 500%, 600%, 700%, 800%, 900%, or 1000%, or by a range defined by any of the two aforementioned percentages.

[0016] In some embodiments, the composition comprises an oligonucleotide that targets MST1R and when administered to a subject in an effective amount improves (e.g. increases) a lung function measurement. The lung function measurement may include a measurement of forced expiratory volume in 1 second (FEV1), forced expiratory volume in 1 second percent predicted (FEV1pp), forced vital capacity (FVC), FEV1/FVC ratio, forced expiratory volume, or peak expiratory flow. In some embodiments, the lung function measurement is improved by about 2.5% or more, about 5% or more, or about 7.5% or more, as compared to prior to administration. In some embodiments, the lung function measurement is improved by about 10% or more, as compared to prior to administration. In some embodiments, the lung function measurement is improved by about 20% or more, about 30% or more, about 40% or more, about 50% or more, about 60% or more, about 70% or more, about 80% or more, about 90% or more, or about 100% or more, as compared to prior to administration. In some embodiments, the lung function measurement is improved by about 200% or more, about 300% or more, about 400% or more, about 500% or more, about 600% or more, about 700% or more, about 800% or more, about 900% or more, or about 1000% or more, as compared to prior to administration. In some embodiments, the lung function measurement is improved by no more than about 2.5%, no more than about 5%, or no more than about 7.5%, as compared to prior to administration. In some embodiments, the lung function measurement is improved by no more than about 10%, as compared to prior to administration. In some embodiments, the lung function measurement is improved by no more than about 20%, no more than about 30%, no more than about 40%, no more than about 50%, no more than about 60%, no more than about 70%, no more than about 80%, no more than about 90%, or no more than about 100%, as compared to prior to administration. In some embodiments, the lung function measurement is improved by no more than about 200%, no more than about 300%, no more than about 400%, no more than about 500%, no more than about 600%, no more than about 700%, no more than about 800%, no more than about 900%, or no more than about 1000%, as compared to prior to administration. In some embodiments, the lung function measurement is improved by 2.5%, 5%, 7.5%, 10%, 15%, 20%, 25%, 30%, 35%, 40%, 45%, 50%, 55%, 60%, 65%, 70%, 75%, 80%, 85%, 90%, 95%, 100%, 150%, 200%, 250%, 300%, 400%, 500%, 600%, 700%, 800%, 900%, or 1000%, or by a range defined by any of the two aforementioned percentages.

[0017] A leukocyte measurement may be affected by a lung disorder. For example, some inflammatory lung disorders that may include chronic obstructive pulmonary disease (COPD) or asthma may lead to increased inflammation and circulating white blood cell counts that may be treated using a composition comprising an oligonucleotide; or lung inflammation concomitant with a lung disorder may include an increase in leukocytes in a lung tissue or lung fluid (e.g. bronchoalveolar fluid). In some embodiments, the composition comprises an oligonucleotide that targets MST1R and when administered to a subject in an effective amount changes a leukocyte measurement in a cell, fluid or tissue of the subject. In some embodiments, the cell is a lung cell, lung epithelial cell, type I or II alveolar cell, macrophage, alveolar macrophage, goblet cell, club cell, or fibroblast. In some embodiments, the tissue is lung tissue. In some embodiments, the fluid is a blood, serum, or plasma sample. In some embodiments, the fluid is a lung fluid such as a bronchoalveolar fluid. The change may be a decrease (for example, when circulating levels of leukocytes, or levels of leukocytes in lungs are increased due to an inflammatory lung disorder). The change may be an increase in some embodiments. In some embodiments, the leukocyte measurement is changed by about 2.5% or more, about 5% or more, or about 7.5% or more, as compared to prior to administration. In some embodiments, the leukocyte measurement is changed by about 10% or more, as compared to prior to administration. In some embodiments, the leukocyte measurement is changed by about 20% or more, about 30% or more, about 40% or more, about 50% or more, about 60% or more, about 70% or more, or about 80% or more, as compared to prior to administration. In some embodiments, the leukocyte measurement is changed by no more than about 2.5%, no more than about 5%, or no more than about 7.5%, as compared to prior to administration. In some embodiments, the leukocyte measurement is changed by no more than about 10%, as compared to prior to administration. In some embodiments, the leukocyte measurement is changed by no more than about 20%, no more than about 30%, no more than about 40%, no more than about 50%, no more than about 60%, no more than about 70%, no more than about 80%, or no more than about 90%, as compared to prior to administration. In some embodiments, the leukocyte measurement is changed by 2.5%, 5%, 7.5%, 10%, 15%, 20%, 25%, 30%, 35%, 40%, 45%, 50%, 55%, 60%, 65%, 70%, 75%, 80%, 85%, or 90%, or by a range defined by any of the two aforementioned percentages.

[0018] In some embodiments, the composition comprises an oligonucleotide that targets MST1R and when administered to a subject in an effective amount decreases chronic obstructive pulmonary disease (COPD) exacerbations in the subject. In some embodiments, the COPD exacerbations are decreased by about 2.5% or more, about 5% or more, or about 7.5% or more, as compared to prior to administration. In some embodiments, the COPD exacerbations are decreased by about 10% or more, as compared to prior to administration. In some embodiments, the COPD exacerbations are decreased by about 20% or more, about 30% or more, about 40% or more, about 50% or more, about 60% or more, about 70% or more, about 80% or more, about 90% or more, or about 100%, as compared to prior to administration. In some embodiments, the COPD exacerbations are decreased by no more than about 2.5%, no more than about 5%, or no more than about 7.5%, as compared to prior to administration. In some embodiments, the COPD exacerbations are decreased by no more than about 10%, as compared to prior to administration. In some embodiments, the COPD exacerbations are decreased by no more than about 20%, no more than about 30%, no more than about 40%, no more than about 50%, no more than about 60%, no more than about 70%, no more than about 80%, or no more than about 90%, as compared to prior to administration. In some embodiments, the COPD exacerbations are decreased by 2.5%, 5%, 7.5%, 10%, 15%, 20%, 25%, 30%, 35%, 40%, 45%, 50%, 55%, 60%, 65%, 70%, 75%, 80%, 85%, 90%, 95%, or 100%, or by a range defined by any of the two aforementioned percentages.

[0019] In some embodiments, the composition comprises an oligonucleotide that targets MST1R and when administered to a subject in an effective amount decreases asthma exacerbations in the subject. In some embodiments, the asthma exacerbations are decreased by about 2.5% or more, about 5% or more, or about 7.5% or more, as compared to prior to administration. In some embodiments, the asthma exacerbations are decreased by about 10% or more, as compared to prior to administration. In some embodiments, the asthma exacerbations are decreased by about 20% or more, about 30% or more, about 40% or more, about 50% or more, about 60% or more, about 70% or more, about 80% or more, about 90% or more, or about 100%, as compared to prior to administration. In some embodiments, the asthma exacerbations are decreased by no more than about 2.5%, no more than about 5%, or no more than about 7.5%, as compared to prior to administration. In some embodiments, the asthma exacerbations are decreased by no more than about 10%, as compared to prior to administration. In some embodiments, the asthma exacerbations are decreased by no more than about 20%, no more than about 30%, no more than about 40%, no more than about 50%, no more than about 60%, no more than about 70%, no more than about 80%, or no more than about 90%, as compared to prior to administration. In some embodiments, the asthma exacerbations are decreased by 2.5%, 5%, 7.5%, 10%, 15%, 20%, 25%, 30%, 35%, 40%, 45%, 50%, 55%, 60%, 65%, 70%, 75%, 80%, 85%, 90%, 95%, or 100%, or by a range defined by any of the two aforementioned percentages.

A. siRNAs

[0020] In some embodiments, the composition comprises an oligonucleotide that targets MST1R, wherein the oligonucleotide comprises a small interfering RNA (siRNA). In some embodiments, the composition comprises an oligonucleotide that targets MST1R, wherein the oligonucleotide comprises a small interfering RNA (siRNA) comprising a sense strand and an antisense strand.

[0021] In some embodiments, the composition comprises an oligonucleotide that inhibits the expression of MST1R, wherein the oligonucleotide comprises an siRNA comprising a sense strand and an antisense strand, wherein the sense strand is 12-30 nucleosides in length. In some embodiments, the composition comprises a sense strand that is 10, 11, 12, 13, 14, 15, 16, 17, 18, 19, 20, 21, 22, 23, 24, 25, 26, 27, 28, 29, or 30 nucleosides in length, or a range defined by any of the two aforementioned numbers. The sense strand may be 14-30 nucleosides in length. In some embodiments, the composition comprises an antisense strand is 12-30 nucleosides in length. In some embodiments, the composition comprises an antisense strand that is 10, 11, 12, 13, 14, 15, 16, 17, 18, 19, 20, 21, 22, 23, 24, 25, 26, 27, 28, 29, or 30 nucleosides in length, or a range defined by any of the two aforementioned numbers. The antisense strand may be 14-30 nucleosides in length.

[0022] In some embodiments, the composition comprises an oligonucleotide that inhibits the expression of MST1R, wherein the oligonucleotide comprises an siRNA comprising a sense strand and an antisense strand, each strand is independently about 12-30 nucleosides in length, and at least one of the sense strand and the antisense strand comprises a nucleoside sequence comprising about 12-30 contiguous nucleosides of a full-length human MST1R mRNA sequence such as SEQ ID NO: 9818. In some embodiments, at least one of the sense strand and the antisense strand comprise a nucleoside sequence comprising at least about 10, 11, 12, 13, 14, 15, 16, 17, 18, 19, 20, 21, 22, 23, 24, 25, 26, 27, 28, 29, 30, or more contiguous nucleosides of one of SEQ ID NO: 9818.

[0023] In some embodiments, the composition comprises an oligonucleotide that inhibits the expression of MST1R, wherein the oligonucleotide comprises an siRNA comprising a sense strand and an antisense strand, wherein the sense strand and the antisense strand form a double-stranded RNA duplex. In some embodiments, the first base pair of the double-stranded RNA duplex is an AU base pair.

[0024] In some embodiments, the sense strand further comprises a 3′ overhang. In some embodiments, the 3′ overhang comprises 1, 2, 3, 4, 5, 6, 7, 8, 9, or 10 nucleosides, or a range of nucleotides defined by any two of the aforementioned numbers. In some embodiments, the 3′ overhang comprises 1, 2, or more nucleosides. In some embodiments, the 3′ overhang comprises 2 nucleosides. In some embodiments, the sense strand further comprises a 5′ overhang. In some embodiments, the 5′ overhang comprises 1, 2, 3, 4, 5, 6, 7, 8, 9, or 10 nucleosides, or a range of nucleotides defined by any two of the aforementioned numbers. In some embodiments, the 5′ overhang comprises 1, 2, or more nucleosides. In some embodiments, the 5′ overhang comprises 2 nucleosides.

[0025] In some embodiments, the antisense strand further comprises a 3′ overhang. In some embodiments, the 3′ overhang comprises 1, 2, 3, 4, 5, 6, 7, 8, 9, or 10 nucleosides, or a range of nucleotides defined by any two of the aforementioned numbers. In some embodiments, the 3′ overhang comprises 1, 2, or more nucleosides. In some embodiments, the 3′ overhang comprises 2 nucleosides. In some embodiments, the antisense strand further comprises a 5′ overhang. In some embodiments, the 5′ overhang comprises 1, 2, 3, 4, 5, 6, 7, 8, 9, or 10 nucleosides, or a range of nucleotides defined by any two of the aforementioned numbers. In some embodiments, the 5′ overhang comprises 1, 2, or more nucleosides. In some embodiments, the 5′ overhang comprises 2 nucleosides.

[0026] In some embodiments, the composition comprises an oligonucleotide that inhibits the expression of MST1R, wherein the oligonucleotide comprises an siRNA comprising a sense strand and an antisense strand, wherein the siRNA binds with a 19mer in a human MST1R mRNA. In some embodiments, the siRNA binds with a 12mer, a 13mer, a 14mer, a 15mer, a 16mer, a 17mer, a 18mer, a 19mer, a 20mer, a 21mer, a 22mer, a 23mer, a 24mer, or a 25mer in a human MST1R mRNA.

[0027] In some embodiments, the composition comprises an oligonucleotide that inhibits the expression of MST1R, wherein the oligonucleotide comprises an siRNA comprising a sense strand and an antisense strand, wherein the siRNA binds with a 17mer in a non-human primate MST1R mRNA. In some embodiments, the siRNA binds with a 12mer, a 13mer, a 14mer, a 15mer, a 16mer, a 17mer, a 18mer, a 19mer, a 20mer, a 21mer, a 22mer, a 23mer, a 24mer, or a 25mer in a non-human primate MST1R mRNA.

[0028] In some embodiments, the composition comprises an oligonucleotide that inhibits the expression of MST1R, wherein the oligonucleotide comprises an siRNA comprising a sense strand and an antisense strand, wherein the siRNA binds with a human MST1R mRNA and less than or equal to 20 human off-targets, with no more than 2 mismatches in the antisense strand. In some embodiments, the siRNA binds with a human MST1R mRNA and less than or equal to 10 human off-targets, with no more than 2 mismatches in the antisense strand. In some embodiments, the siRNA binds with a human MST1R mRNA and less than or equal to 30 human off-targets, with no more than 2 mismatches in the antisense strand. In some embodiments, the siRNA binds with a human MST1R mRNA and less than or equal to 40 human off-targets, with no more than 2 mismatches in the antisense strand. In some embodiments, the siRNA binds with a human MST1R mRNA and less than or equal to 50 human off-targets, with no more than 2 mismatches in the antisense strand. In some embodiments, the siRNA binds with a human MST1R mRNA and less than or equal to 10 human off-targets, with no more than 3 mismatches in the antisense strand. In some embodiments, the siRNA binds with a human MST1R mRNA and less than or equal to 20 human off-targets, with no more than 3 mismatches in the antisense strand. In some embodiments, the siRNA binds with a human MST1R mRNA and less than or equal to 30 human off-targets, with no more than 3 mismatches in the antisense strand. In some embodiments, the siRNA binds with a human MST1R mRNA and less than or equal to 40 human off-targets, with no more than 3 mismatches in the antisense strand. In some embodiments, the siRNA binds with a human MST1R mRNA and less than or equal to 50 human off-targets, with no more than 3 mismatches in the antisense strand.

[0029] In some embodiments, the composition comprises an oligonucleotide that inhibits the expression of MST1R, wherein the oligonucleotide comprises an siRNA comprising a sense strand and an antisense strand, siRNA binds with a human MST1R mRNA target site that does not harbor an SNP, with a minor allele frequency (MAF) greater or equal to 1% (pos. 2-18). In some embodiments, the MAF is greater or equal to about 2%, about 3%, about 4%, about 5%, about 6%, about 7%, about 8%, about 9%, about 10%, about 11%, about 12%, about 13%, about 14%, about 15%, about 16%, about 17%, about 18%, about 19%, or about 20%.

[0030] In some embodiments, the composition comprises an oligonucleotide that inhibits the expression of MST1R, wherein the oligonucleotide comprises an siRNA comprising a sense strand and an antisense strand, wherein the sense strand comprises a nucleoside sequence comprising or consisting of the sequence of any one of SEQ ID NOs: 1-4754, or a nucleic acid sequence thereof having 1 or 2 nucleoside substitutions, additions, or deletions. In some embodiments, the sense strand comprises a nucleoside sequence comprising or consisting of the sequence of any one of SEQ ID NOs: 1-4754, or a nucleic acid sequence thereof having 3 or 4 nucleoside substitutions, additions, or deletions. In some embodiments, the sense strand further comprises a 3′ overhang. In some embodiments, the 3′ overhang comprises 1, 2, 3, 4, 5, 6, 7, 8, 9, or 10 nucleosides, or a range of nucleotides defined by any two of the aforementioned numbers. In some embodiments, the 3′ overhang comprises 1, 2, or more nucleosides. In some embodiments, the 3′ overhang comprises 2 nucleosides. In some embodiments, the sense strand further comprises a 5′ overhang. In some embodiments, the 5′ overhang comprises 1, 2, 3, 4, 5, 6, 7, 8, 9, or 10 nucleosides, or a range of nucleotides defined by any two of the aforementioned numbers. In some embodiments, the 5′ overhang comprises 1, 2, or more nucleosides. In some embodiments, the 5′ overhang comprises 2 nucleosides. In some embodiments, the sense strand comprises a nucleoside sequence comprising or consisting of the sequence of any one of SEQ ID NOs: 1-4754, or a nucleic acid sequence thereof having 1 or 2 nucleoside additions at the 3′ end. In some embodiments, the composition comprises an oligonucleotide that inhibits the expression of MST1R, wherein the oligonucleotide comprises an siRNA comprising a sense strand and an antisense strand, wherein the sense strand comprises a nucleoside sequence comprising or consisting of the sequence of any one of SEQ ID NOs: 1-4754.

[0031] In some embodiments, the composition comprises an oligonucleotide that inhibits the expression of MST1R, wherein the oligonucleotide comprises an siRNA comprising a sense strand and an antisense strand, wherein the antisense strand comprises a nucleoside sequence comprising or consisting of the sequence of any one of SEQ ID NOs: 4755-9508, or a nucleic acid sequence thereof having 1 or 2 nucleoside substitutions, additions, or deletions. In some embodiments, the antisense strand sequence comprises a nucleoside sequence comprising or consisting of the sequence of any one of SEQ ID NOs: 4755-9508, or a nucleic acid sequence thereof having 3 or 4 nucleoside substitutions, additions, or deletions. In some embodiments, the antisense strand further comprises a 3′ overhang. In some embodiments, the 3′ overhang comprises 1, 2, 3, 4, 5, 6, 7, 8, 9, or 10 nucleosides, or a range of nucleotides defined by any two of the aforementioned numbers. In some embodiments, the 3′ overhang comprises 1, 2, or more nucleosides. In some embodiments, the 3′ overhang comprises 2 nucleosides. In some embodiments, the antisense strand further comprises a 5′ overhang. In some embodiments, the 5′ overhang comprises 1, 2, 3, 4, 5, 6, 7, 8, 9, or 10 nucleosides, or a range of nucleotides defined by any two of the aforementioned numbers. In some embodiments, the 5′ overhang comprises 1, 2, or more nucleosides. In some embodiments, the 5′ overhang comprises 2 nucleosides. In some embodiments, the antisense strand comprises a nucleoside sequence comprising or consisting of the sequence of any one of SEQ ID NOs: 4755-9508, or a nucleic acid sequence thereof having 1 or 2 nucleoside additions at the 3′ end. In some embodiments, the composition comprises an oligonucleotide that inhibits the expression of MST1R, wherein the oligonucleotide comprises an siRNA comprising a sense strand and an antisense strand, wherein the antisense strand comprises a nucleoside sequence comprising or consisting of the sequence of any one of SEQ ID NOs: 4755-9508.

[0032] In some embodiments, the siRNA comprises the sense strand and/or the antisense strand sequence of an siRNA in any one of Tables 3-8, or a nucleic acid sequence thereof having 3 or 4 nucleoside substitutions, additions, or deletions. In some embodiments, the siRNA comprises the sense strand and/or the antisense strand sequence of an siRNA in any one of Tables 3-8, or a nucleic acid sequence thereof having 1 or 2 nucleoside substitutions, additions, or deletions. In some embodiments, the siRNA comprises the sense strand and/or the antisense strand sequence of an siRNA in any one of Tables 3-8. In some embodiments, the siRNA is cross-reactive with a non-human primate (NHP) MST1R mRNA. The siRNA may include one or more internucleoside linkages and/or one or more nucleoside modifications.

[0033] In some embodiments, the siRNA comprises the sense strand and/or the antisense strand sequence of an siRNA of subset A, or a nucleic acid sequence thereof having 3 or 4 nucleoside substitutions, additions, or deletions. In some embodiments, the siRNA comprises the sense strand and/or the antisense strand sequence of an siRNA of subset A, or a nucleic acid sequence thereof having 1 or 2 nucleoside substitutions, additions, or deletions. In some embodiments, the siRNA comprises the sense strand and/or the antisense strand sequence of an siRNA of subset A. In some embodiments, the siRNA is cross-reactive with a non-human primate (NHP) MST1R mRNA. The siRNA may include one or more internucleoside linkages and/or one or more nucleoside modifications.

[0034] In some embodiments, the siRNA comprises the sense strand and/or the antisense strand sequence of an siRNA of subset B, or a nucleic acid sequence thereof having 3 or 4 nucleoside substitutions, additions, or deletions. In some embodiments, the siRNA comprises the sense strand and/or the antisense strand sequence of an siRNA of subset B, or a nucleic acid sequence thereof having 1 or 2 nucleoside substitutions, additions, or deletions. In some embodiments, the siRNA comprises the sense strand and/or the antisense strand sequence of an siRNA of subset B. In some embodiments, the siRNA is cross-reactive with a non-human primate (NHP) MST1R mRNA. The siRNA may include one or more internucleoside linkages and/or one or more nucleoside modifications.

[0035] In some embodiments, the siRNA comprises the sense strand and/or the antisense strand sequence of an siRNA of subset C, or a nucleic acid sequence thereof having 3 or 4 nucleoside substitutions, additions, or deletions. In some embodiments, the siRNA comprises the sense strand and/or the antisense strand sequence of an siRNA of subset C, or a nucleic acid sequence thereof having 1 or 2 nucleoside substitutions, additions, or deletions. In some embodiments, the siRNA comprises the sense strand and/or the antisense strand sequence of an siRNA of subset C. In some embodiments, the siRNA is cross-reactive with a non-human primate (NHP) MST1R mRNA. The siRNA may include one or more internucleoside linkages and/or one or more nucleoside modifications.

[0036] In some embodiments, the siRNA comprises the sense strand and/or the antisense strand sequence of an siRNA of subset D, or a nucleic acid sequence thereof having 3 or 4 nucleoside substitutions, additions, or deletions. In some embodiments, the siRNA comprises the sense strand and/or the antisense strand sequence of an siRNA of subset D, or a nucleic acid sequence thereof having 1 or 2 nucleoside substitutions, additions, or deletions. In some embodiments, the siRNA comprises the sense strand and/or the antisense strand sequence of an siRNA of subset D. In some embodiments, the siRNA is cross-reactive with a non-human primate (NHP) MST1R mRNA. The siRNA may include one or more internucleoside linkages and/or one or more nucleoside modifications.

[0037] In some embodiments, the siRNA comprises the sense strand and/or the antisense strand sequence of an siRNA of subset E, or a nucleic acid sequence thereof having 3 or 4 nucleoside substitutions, additions, or deletions. In some embodiments, the siRNA comprises the sense strand and/or the antisense strand sequence of an siRNA of subset E, or a nucleic acid sequence thereof having 1 or 2 nucleoside substitutions, additions, or deletions. In some embodiments, the siRNA comprises the sense strand and/or the antisense strand sequence of an siRNA of subset E. In some embodiments, the siRNA is cross-reactive with a non-human primate (NHP) MST1R mRNA. The siRNA may include one or more internucleoside linkages and/or one or more nucleoside modifications.

[0038] In some embodiments, the siRNA comprises the sense strand and/or the antisense strand sequence of an siRNA of subset F, or a nucleic acid sequence thereof having 3 or 4 nucleoside substitutions, additions, or deletions. In some embodiments, the siRNA comprises the sense strand and/or the antisense strand sequence of an siRNA of subset F, or a nucleic acid sequence thereof having 1 or 2 nucleoside substitutions, additions, or deletions. In some embodiments, the siRNA comprises the sense strand and/or the antisense strand sequence of an siRNA of subset F. In some embodiments, the siRNA is cross-reactive with a non-human primate (NHP) MST1R mRNA. The siRNA may include one or more internucleoside linkages and/or one or more nucleoside modifications.

### B. ASOs

[0039] In some embodiments, the composition comprises an oligonucleotide that inhibits the expression of MST1R, wherein the oligonucleotide comprises an antisense oligonucleotide (ASO). In some embodiments, the ASO is 12-30 nucleosides in length. In some embodiments, the ASO is 14-30 nucleosides in length. In some embodiments, the ASO is at least about 10, 11, 12, 13, 14, 15, 16, 17, 18, 19, 20, 21, 22, 23, 24, 25, 26, 27, 28, 29, or 30 nucleosides in length, or a range defined by any of the two aforementioned numbers. In some embodiments, the ASO is 15-25 nucleosides in length. In some embodiments, the ASO is 20 nucleosides in length.

[0040] In some embodiments, the composition comprises an oligonucleotide that inhibits the expression of MST1R, wherein the oligonucleotide comprises an ASO about 12-30 nucleosides in length and comprising a nucleoside sequence complementary to about 12-30 contiguous nucleosides of a full-length human MST1R mRNA sequence such as SEQ ID NO: 9818; wherein (i) the oligonucleotide comprises a modification comprising a modified nucleoside and/or a modified internucleoside linkage, and/or (ii) the composition comprises a pharmaceutically acceptable carrier. In some embodiments, the ASO comprise a nucleoside sequence complementary to at least about 10, 11, 12, 13, 14, 15, 16, 17, 18, 19, 20, 21, 22, 23, 24, 25, 26, 27, 28, 29, 30, or more contiguous nucleosides of one of SEQ ID NO: 9818.

### C. Modification Patterns

[0041] In some embodiments, the composition comprises an oligonucleotide that inhibits the expression of MST1R, wherein the oligonucleotide comprises a modification comprising a modified nucleoside and/or a modified internucleoside linkage, and/or (ii) the composition comprises a pharmaceutically acceptable carrier. In some embodiments, the oligonucleotide comprises a modification comprising a modified nucleoside and/or a modified internucleoside linkage. In some embodiments, the oligonucleotide comprises a modified internucleoside linkage. In some embodiments, the modified internucleoside linkage comprises alkylphosphonate, phosphorothioate, methylphosphonate, phosphorodithioate, alkylphosphonothioate, phosphoramidate, carbamate, carbonate, phosphate triester, acetamidate, or carboxymethyl ester, or a combination thereof. In some embodiments, the modified internucleoside linkage comprises one or more phosphorothioate linkages. A phosphorothioate may include a nonbridging oxygen atom in a phosphate backbone of the oligonucleotide that is replaced by sulfur. Modified internucleoside linkages may be included in siRNAs or ASOs. Benefits of the modified internucleoside linkage may include decreased toxicity or improved pharmacokinetics.

[0042] In some embodiments, the composition comprises an oligonucleotide that inhibits the expression of MST1R, wherein the oligonucleotide comprises a modified internucleoside linkage, wherein the oligonucleotide comprises 1, 2, 3, 4, 5, 6, 7, 8, 9, 10, 11, 12, 13, 14, 15, 16, 17, 18, 19, or 20 modified internucleoside linkages, or a range of modified internucleoside linkages defined by any two of the aforementioned numbers. In some embodiments, the oligonucleotide comprises no more than 18 modified internucleoside linkages. In some embodiments, the oligonucleotide comprises no more than 20 modified internucleoside linkages. In some embodiments, the oligonucleotide comprises 2 or more modified internucleoside linkages, 3 or more modified internucleoside linkages, 4 or more modified internucleoside linkages, 5 or more modified internucleoside linkages, 6 or more modified internucleoside linkages, 7 or more modified internucleoside linkages, 8 or more modified internucleoside linkages, 9 or more modified internucleoside linkages, 10 or more modified internucleoside linkages, 11 or more modified internucleoside linkages, 12 or more modified internucleoside linkages, 13 or more modified internucleoside linkages, 14 or more modified internucleoside linkages, 15 or more modified internucleoside linkages, 16 or more modified internucleoside linkages, 17 or more modified internucleoside linkages, 18 or more modified internucleoside linkages, 19 or more modified internucleoside linkages, or 20 or more modified internucleoside linkages.

[0043] In some embodiments, the composition comprises an oligonucleotide that inhibits the expression of MST1R, wherein the oligonucleotide comprises the modified nucleoside. In some embodiments, the modified nucleoside comprises a locked nucleic acid (LNA), hexitol nucleic acid (HLA), cyclohexene nucleic acid (CeNA), 2′-methoxyethyl, 2′-O-alkyl, 2′-O-allyl, 2′-fluoro, or 2′-deoxy, or a combination thereof. In some embodiments, the modified nucleoside comprises a LNA. In some embodiments, the modified nucleoside comprises a 2′,4′ constrained ethyl nucleic acid. In some embodiments, the modified nucleoside comprises HLA. In some embodiments, the modified nucleoside comprises CeNA. In some embodiments, the modified nucleoside comprises a 2′-methoxyethyl group. In some embodiments, the modified nucleoside comprises a 2′-O-alkyl group. In some embodiments, the modified nucleoside comprises a 2′-O-allyl group. In some embodiments, the modified nucleoside comprises a 2′-fluoro group. In some embodiments, the modified nucleoside comprises a 2′-deoxy group. In some embodiments, the modified nucleoside comprises a 2′-O-methyl nucleoside, 2′-deoxyfluoro nucleoside, 2′-O—N-methylacetamido (2′-O-NMA) nucleoside, a 2′-O-dimethylaminoethoxyethyl (2′-O-DMAEOE) nucleoside, 2′-O-aminopropyl (2′-O-AP) nucleoside, or 2′-ara-F, or a combination thereof. In some embodiments, the modified nucleoside comprises a 2′-O-methyl nucleoside. In some embodiments, the modified nucleoside comprises a 2′-deoxyfluoro nucleoside. In some embodiments, the modified nucleoside comprises a 2′-O-NMA nucleoside. In some embodiments, the modified nucleoside comprises a 2′-O-DMAEOE nucleoside. In some embodiments, the modified nucleoside comprises a 2′-O-aminopropyl (2′-O-AP) nucleoside. In some embodiments, the modified nucleoside comprises 2′-ara-F. In some embodiments, the modified nucleoside comprises one or more 2′fluoro modified nucleosides. In some embodiments, the modified nucleoside comprises a 2′ O-alkyl modified nucleoside. Benefits of the modified nucleoside may include decreased toxicity or improved pharmacokinetics.

[0044] In some embodiments, the oligonucleotide comprises 1, 2, 3, 4, 5, 6, 7, 8, 9, 10, 11, 12, 13, 14, 15, 16, 17, 18, 19, 20, or 21 modified nucleosides, or a range of nucleosides defined by any two of the aforementioned numbers. In some embodiments, the oligonucleotide comprises no more than 19 modified nucleosides. In some embodiments, the oligonucleotide comprises no more than 21 modified nucleosides. In some embodiments, the oligonucleotide comprises 2 or more modified nucleosides, 3 or more modified nucleosides, 4 or more modified nucleosides, 5 or more modified nucleosides, 6 or more modified nucleosides, 7 or more modified nucleosides, 8 or more modified nucleosides, 9 or more modified nucleosides, 10 or more modified nucleosides, 11 or more modified nucleosides, 12 or more modified nucleosides, 13 or more modified nucleosides, 14 or more modified nucleosides, 15 or more modified nucleosides, 16 or more modified nucleosides, 17 or more modified nucleosides, 18 or more modified nucleosides, 19 or more modified nucleosides, 20 or more modified nucleosides, or 21 or more modified nucleosides.

[0045] The oligonucleotide may be chemically conjugated to a targeting group, lipid (including, but not limited to cholesterol, cholesteryl derivatives, and fatty acids), nanoparticle, polymer, liposome, micelle, or other delivery system. A targeting group may be linked to a 3′ or 5′ end of the oligonucleotide (e.g. to a 3′ or 5′ end of a sense strand or an antisense strand). In some embodiments, a targeting group is linked internally to a nucleotide on a sense strand or an antisense strand of the oligonucleotide. In some embodiments, a targeting group is linked to the oligonucleotide via a linker.

[0046] In some embodiments, the composition comprises an oligonucleotide that inhibits the expression of MST1R, wherein the oligonucleotide comprises a moiety attached at a 3′ or 5′ terminus of the oligonucleotide. Examples of moieties include an integrin targeting ligand, a hydrophobic moiety, a sugar moiety, or a combination thereof. In some embodiments, the oligonucleotide is an siRNA having a sense strand, and the moiety is attached to a 5′ end of the sense strand. In some embodiments, the oligonucleotide is an siRNA having a sense strand, and the moiety is attached to a 3′ end of the sense strand. In some embodiments, the oligonucleotide is an siRNA having an antisense strand, and the moiety is attached to a 5′ end of the antisense strand. In some embodiments, the oligonucleotide is an siRNA having an antisense strand, and the moiety is attached to a 3′ end of the antisense strand. In some embodiments, the oligonucleotide is an ASO, and the moiety is attached to a 5′ end of the ASO. In some embodiments, the oligonucleotide is an ASO, and the moiety is attached to a 3′ end of the ASO.

[0047] In some embodiments, the oligonucleotide is delivered to a cell or tissue by linking the oligonucleotide to a targeting group. In some embodiments, the targeting group includes a cell receptor ligand, such as an integrin targeting ligand. Integrins may include a family of transmembrane receptors that facilitate cell-extracellular matrix (ECM) adhesion. In some embodiments, the moiety includes an epithelial-specific integrin. Integrin alpha-v-beta-6 (αvβ6) bay be an example of an epithelial-specific integrin αvβ6 may be a receptor for an ECM protein or TGF-beta latency-associated peptide (LAP). Integrin αvβ6 may be expressed in a cell or tissue. Integrin αvβ6 may be expressed or upregulated in injured pulmonary epithelium.

[0048] In some embodiments, the oligonucleotide is linked to an integrin targeting ligand that has affinity for integrin αvβ6. An integrin targeting ligand may include a compound that has affinity for integrin αvβ6 or integrin alpha-v-beta-3 (αvβ3), may be useful as a ligand to facilitate targeting or delivery of the oligonucleotide to which it is attached to a particular cell type or tissue (e.g., to cells expressing integrin αvβ3 or αvβ6). In some embodiments, multiple integrin targeting ligands are linked to the oligonucleotide. In some embodiments, the oligonucleotide-integrin targeting ligand conjugates are selectively internalized by lung epithelial cells, either through receptor-mediated endocytosis or by other means.

[0049] Examples of targeting groups useful for delivering the oligonucleotide that include integrin targeting ligands may be based upon peptides or peptide mimics containing an arginine-glycine-aspartic acid (RGD) peptide. In some embodiments, the composition comprises an oligonucleotide that inhibits the expression of MST1R, wherein the oligonucleotide comprises an RGD peptide. In some embodiments, the composition comprises an RGD peptide. In some embodiments, the composition comprises an RGD peptide derivative. In some embodiments, the RGD peptide is attached at a 3′ terminus of the oligonucleotide. In some embodiments, the RGD peptide is attached at a 5′ terminus of the oligonucleotide. In some embodiments, the composition comprises a sense strand, and the RGD peptide is attached to the sense strand (e.g. attached to a 5′ end of the sense strand, or attached to a 3′ end of the sense strand). In some embodiments, the composition comprises an antisense strand, and the RGD peptide is attached to the antisense strand (e.g. attached to a 5′ end of the antisense strand, or attached to a 3′ end of the antisense strand). In some embodiments, the composition comprises an RGD peptide attached at a 3′ or 5′ terminus of the oligonucleotide. In some embodiments, the oligonucleotide comprises an RGD peptide and a lipid attached at a 3′ or 5′ terminus of the oligonucleotide. The RGD peptide may be linear. The RGD peptide may be cyclic. An RGD peptide may include a D-amino acid. In some embodiments, the RGD peptide comprises Cyclo(-Arg-Gly-Asp-D-Phe-Cys) (SEQ ID NO: 9837). In some embodiments, the RGD peptide comprises Cyclo(-Arg-Gly-Asp-D-Phe-Lys) (SEQ ID NO: 9838). In some embodiments, the RGD peptide comprises Cyclo(-Arg-Gly-Asp-D-Phe-azido) (SEQ ID NO: 9839). In some embodiments, the RGD peptide comprises an amino benzoic acid derived RGD. In some embodiments, the RGD peptide comprises Cyclo(-Arg-Gly-Asp-D-Phe-Cys) (SEQ ID NO: 9837), Cyclo(-Arg-Gly-Asp-D-Phe-Lys) (SEQ ID NO: 9838), Cyclo(-Arg-Gly-Asp-D-Phe-azido) (SEQ ID NO: 9839), an amino benzoic acid derived RGD, or a combination thereof. In some embodiments, the RGD peptide comprises multiple of such RGD peptides. For example, the RGD peptide may include 2, 3, or 4 RGD peptides. Some embodiments include an arginine-glycine-glutamic acid peptide.

[0050] In some embodiments, the composition comprises an oligonucleotide that inhibits the expression of MST1R, wherein the oligonucleotide comprises a hydrophobic moiety. The hydrophobic moiety may be attached at a 3′ or 5′ terminus of the oligonucleotide. The hydrophobic moiety may include a lipid such as a fatty acid. The hydrophobic moiety may include a hydrocarbon. The hydrocarbon may be linear. The hydrocarbon may be non-linear. The hydrophobic moiety may include a lipid moiety or a cholesterol moiety, or a combination thereof.

[0051] In some embodiments, the composition comprises an oligonucleotide that inhibits the expression of MST1R, wherein the oligonucleotide comprises a lipid attached at a 3′ or 5′ terminus of the oligonucleotide. In some embodiments, the lipid comprises cholesterol, myristoyl, palmitoyl, stearoyl, lithocholoyl, docosanoyl, docosahexaenoyl, myristyl, palmityl stearyl, or α-tocopherol, or a combination thereof.

[0052] The oligonucleotide may include purines. Examples of purines include adenine (A) or guanine (G), or modified versions thereof. The oligonucleotide may include pyrimidines. Examples of pyrimidines include cytosine (C), thymine (T), or uracil (U), or modified versions thereof.

[0053] In some embodiments, purines of the oligonucleotide comprise 2′ fluoro modified purines. In some embodiments, purines of the oligonucleotide comprise 2′-O-methyl modified purines. In some embodiments, purines of the oligonucleotide comprise a mixture of 2′ fluoro and 2′-O-methyl modified purines. In some embodiments, all purines of the oligonucleotide comprise 2′ fluoro modified purines. In some embodiments, all purines of the oligonucleotide comprise 2′-O-methyl modified purines. In some embodiments, all purines of the oligonucleotide comprise a mixture of 2′ fluoro and 2′-O-methyl modified purines. 2′-O-methyl may include 2′ O-methyl. Where a 2′ O-methyl modification is included, it is contemplated that a 2′ methyl modification may be included, and vice versa.

[0054] In some embodiments, pyrimidines of the oligonucleotide comprise 2′ fluoro modified pyrimidines. In some embodiments, pyrimidines of the oligonucleotide comprise 2′-O-methyl modified pyrimidines. In some embodiments, pyrimidines of the oligonucleotide comprise a mixture of 2′ fluoro and 2′-O-methyl modified pyrimidines. In some embodiments, all pyrimidines of the oligonucleotide comprise 2′ fluoro modified pyrimidines. In some embodiments, all pyrimidines of the oligonucleotide comprise 2′-O-methyl modified pyrimidines. In some embodiments, all pyrimidines of the oligonucleotide comprise a mixture of 2′ fluoro and 2′-O-methyl modified pyrimidines.

[0055] In some embodiments, purines of the oligonucleotide comprise 2′ fluoro modified purines, and pyrimidines of the oligonucleotide comprise a mixture of 2′ fluoro and 2′-O-methyl modified pyrimidines. In some embodiments, purines of the oligonucleotide comprise 2′-O-methyl modified purines, and pyrimidines of the oligonucleotide comprise a mixture of 2′ fluoro and 2′-O-methyl modified pyrimidines. In some embodiments, purines of the oligonucleotide comprise 2′ fluoro modified purines, and pyrimidines of the oligonucleotide comprise 2′-O-methyl modified pyrimidines. In some embodiments, purines of the oligonucleotide comprise 2′-O-methyl modified purines, and pyrimidines of the oligonucleotide comprise 2′ fluoro modified pyrimidines. In some embodiments, pyrimidines of the oligonucleotide comprise 2′ fluoro modified pyrimidines, and purines of the oligonucleotide comprise a mixture of 2′ fluoro and 2′-O-methyl modified purines. In some embodiments, pyrimidines of the oligonucleotide comprise 2′-O-methyl modified pyrimidines, and purines of the oligonucleotide comprise a mixture of 2′ fluoro and 2′-O-methyl modified purines. In some embodiments, pyrimidines of the oligonucleotide comprise 2′ fluoro modified pyrimidines, and purines of the oligonucleotide comprise 2′-O-methyl modified purines. In some embodiments, pyrimidines of the oligonucleotide comprise 2′-O-methyl modified pyrimidines, and purines of the oligonucleotide comprise 2′ fluoro modified purines.

[0056] In some embodiments, all purines of the oligonucleotide comprise 2′ fluoro modified purines, and all pyrimidines of the oligonucleotide comprise a mixture of 2′ fluoro and 2′-O-methyl modified pyrimidines. In some embodiments, all purines of the oligonucleotide comprise 2′-O-methyl modified purines, and all pyrimidines of the oligonucleotide comprise a mixture of 2′ fluoro and 2′-O-methyl modified pyrimidines. In some embodiments, all purines of the oligonucleotide comprise 2′ fluoro modified purines, and all pyrimidines of the oligonucleotide comprise 2′-O-methyl modified pyrimidines. In some embodiments, all purines of the oligonucleotide comprise 2′-O-methyl modified purines, and all pyrimidines of the oligonucleotide comprise 2′ fluoro modified pyrimidines. In some embodiments, all pyrimidines of the oligonucleotide comprise 2′ fluoro modified pyrimidines, and all purines of the oligonucleotide comprise a mixture of 2′ fluoro and 2′-O-methyl modified purines. In some embodiments, all pyrimidines of the oligonucleotide comprise 2′-O-methyl modified pyrimidines, and all purines of the oligonucleotide comprise a mixture of 2′ fluoro and 2′-O-methyl modified purines. In some embodiments, all pyrimidines of the oligonucleotide comprise 2′ fluoro modified pyrimidines, and all purines of the oligonucleotide comprise 2′-O-methyl modified purines. In some embodiments, all pyrimidines of the oligonucleotide comprise 2′-O-methyl modified pyrimidines, and all purines of the oligonucleotide comprise 2′ fluoro modified purines.

[0057] In some cases, the oligonucleotide comprises a particular modification pattern. In some embodiments, position 9 counting from the 5′ end of the of a strand of the oligonucleotide may have a 2′F modification. In some embodiments, when position 9 of a strand of the oligonucleotide is a pyrimidine, then all purines in a strand of the oligonucleotide have a 2′OMe modification. In some embodiments, when position 9 is the only pyrimidine between positions 5 and 11 of the sense stand, then position 9 is the only position with a 2′F modification in a strand of the oligonucleotide. In some embodiments, when position 9 and only one other base between positions 5 and 11 of a strand of the oligonucleotide are pyrimidines, then both of these pyrimidines are the only two positions with a 2′F modification in a strand of the oligonucleotide. In some embodiments, when position 9 and only two other bases between positions 5 and 11 of a strand of the oligonucleotide are pyrimidines, and those two other pyrimidines are in adjacent positions so that there would be not three 2′F modifications in a row, then any combination of 2′F modifications can be made that give three 2′F modifications in total. In some embodiments, when there are more than 2 pyrimidines between positions 5 and 11 of a strand of the oligonucleotide, then all combinations of pyrimidines having the 2′F modification are allowed that have three to five 2′F modifications in total, provided that a strand of the oligonucleotide does not have three 2′F modifications in a row. In some cases, a strand of the oligonucleotide of any of the siRNAs comprises a modification pattern which conforms to any or all of these a strand of the oligonucleotide rules.

[0058] In some embodiments, when position 9 of a strand of the oligonucleotide is a purine, then all purines in a strand of the oligonucleotide have a 2′OMe modification. In some embodiments, when position 9 is the only purine between positions 5 and 11 of the sense stand, then position 9 is the only position with a 2′F modification in a strand of the oligonucleotide. In some embodiments, when position 9 and only one other base between positions 5 and 11 of a strand of the oligonucleotide are purines, then both of these purines are the only two positions with a 2′F modification in a strand of the oligonucleotide. In some embodiments, when position 9 and only two other bases between positions 5 and 11 of a strand of the oligonucleotide are purines, and those two other purines are in adjacent positions so that there would be not three 2′F modifications in a row, then any combination of 2′F modifications can be made that give three 2′F modifications in total. In some embodiments, when there are more than 2 purines between positions 5 and 11 of a strand of the oligonucleotide, then all combinations of purines having the 2′F modification are allowed that have three to five 2′F modifications in total, provided that a strand of the oligonucleotide does not have three 2′F modifications in a row. In some cases, a strand of the oligonucleotide of any of the siRNAs comprises a modification pattern which conforms to any or all of these a strand of the oligonucleotide rules.

[0059] In some cases, position 9 of a strand of the oligonucleotide can be a 2′deoxy. In these cases, 2′F and 2′OMe modifications may occur at the other positions of a strand of the oligonucleotide. In some cases, a strand of the oligonucleotide of any of the siRNAs comprises a modification pattern which conforms to these a strand of the oligonucleotide rules.

[0060] In some embodiments, position nine of the sense strand comprises a 2′ fluoro-modified pyrimidine. In some embodiments, all purines of the sense strand comprise 2′-O-methyl modified purines. In some embodiments, 1, 2, 3, 4, or 5 pyrimidines between positions 5 and 11 comprise a 2′fluoro-modified pyrimidine, provided there are not three 2′ fluoro-modified pyrimidines in a row. In some embodiments, the odd-numbered positions of the antisense strand comprise 2′-O-methyl modified nucleotides. In some embodiments, the even-numbered positions of the antisense strand comprise 2′fluoro-modified nucleotides and unmodified deoxyribonucleotide. In some embodiments, the even-numbered positions of the antisense strand comprise 2′fluoro-modified nucleotides, 2′-O-methyl modified nucleotides and unmodified deoxyribonucleotide. In some embodiments, position nine of the sense strand comprises a 2′ fluoro-modified pyrimidine; all purines of the sense strand comprises 2′-O-methyl modified purines; 1, 2, 3, 4, or 5 pyrimidines between positions 5 and 11 comprise a 2′fluoro-modified pyrimidine, provided there are not three 2′ fluoro-modified pyrimidines in a row; the odd-numbered positions of the antisense strand comprise 2′-O-methyl modified nucleotides; and the even-numbered positions of the antisense strand comprise 2′fluoro-modified nucleotides and unmodified deoxyribonucleotides.

[0061] In some embodiments, position nine of the sense strand comprises a 2′ fluoro-modified purine. In some embodiments, all pyrimidines of the sense strand comprise 2′-O-methyl modified purines. In some embodiments, 1, 2, 3, 4, or 5 purines between positions 5 and 11 comprise a 2′fluoro-modified purine, provided there are not three 2′ fluoro-modified purine in a row. In some embodiments, the odd-numbered positions of the antisense strand comprise 2′-O-methyl modified nucleotides. In some embodiments, the even-numbered positions of the antisense strand comprise 2′fluoro-modified nucleotides and unmodified deoxyribonucleotide. In some embodiments, the even-numbered positions of the antisense strand comprise 2′fluoro-modified nucleotides, 2′-O-methyl modified nucleotides and unmodified deoxyribonucleotide. In some embodiments, position nine of the sense strand comprises a 2′ fluoro-modified purine; all pyrimidine of the sense strand comprises 2′-O-methyl modified pyrimidines; 1, 2, 3, 4, or 5 purines between positions 5 and 11 comprise a 2′fluoro-modified purines, provided there are not three 2′ fluoro-modified purines in a row; the odd-numbered positions of the antisense strand comprise 2′-O-methyl modified nucleotides; and the even-numbered positions of the antisense strand comprise 2′fluoro-modified nucleotides and unmodified deoxyribonucleotides. In some embodiments, there are not three 2′ fluoro-modified purines in a row. In some embodiments, there are not three 2′ fluoro-modified pyrimidines in a row.

[0062] In some embodiments, position nine of the sense strand comprises an unmodified deoxyribonucleotide. In some embodiments, positions 5, 7, and 8 of the sense strand comprise 2′fluoro-modified nucleotides. In some embodiments, all pyrimidines in positions 10 to 21 of the sense strand comprise 2′-O-methyl modified pyrimidines and all purines in positions 10 to 21 of the comprise 2′-O-methyl modified purines or 2′fluoro-modified purines. In some embodiments, the odd-numbered positions of the antisense strand comprise 2′-O-methyl modified nucleotides. In some embodiments, the even-numbered positions of the antisense strand comprise 2′fluoro-modified nucleotides and unmodified deoxyribonucleotides. In some embodiments, the even-numbered positions of the antisense strand comprise 2′fluoro-modified nucleotides, 2′-O-methyl modified nucleotides and unmodified deoxyribonucleotides. In some embodiments, position nine of the sense strand comprises an unmodified deoxyribonucleotide; positions 5, 7, and 8 of the sense strand comprise 2′fluoro-modified nucleotides; all pyrimidines in positions 10 to 21 of the sense strand comprise 2′-O-methyl modified pyrimidines and all purines in positions 10 to 21 of the comprise 2′-O-methyl modified purines or 2′fluoro-modified purines; the odd-numbered positions of the antisense strand comprise 2′-O-methyl modified nucleotides; and the even-numbered positions of the antisense strand comprise 2′fluoro-modified nucleotides and unmodified deoxyribonucleotides.

[0063] In some embodiments, position nine of the sense strand comprises an unmodified deoxyribonucleotide. In some embodiments, positions 5, 7, and 8 of the sense strand comprise 2′fluoro-modified nucleotides. In some embodiments, all purines in positions 10 to 21 of the sense strand comprise 2′-O-methyl modified purines and all pyrimidines in positions 10 to 21 of the comprise 2′-O-methyl modified pyrimidines or 2′fluoro-modified pyrimidines. In some embodiments, the odd-numbered positions of the antisense strand comprise 2′-O-methyl modified nucleotides. In some embodiments, the even-numbered positions of the antisense strand comprise 2′fluoro-modified nucleotides and unmodified deoxyribonucleotides. In some embodiments, the even-numbered positions of the antisense strand comprise 2′fluoro-modified nucleotides, 2′-O-methyl modified nucleotides and unmodified deoxyribonucleotides. In some embodiments, position nine of the sense strand comprises an unmodified deoxyribonucleotide; positions 5, 7, and 8 of the sense strand comprise 2′fluoro-modified nucleotides; all purines in positions 10 to 21 of the sense strand comprise 2′-O-methyl modified purines and all pyrimidines in positions 10 to 21 of the comprise 2′-O-methyl modified pyrimidines or 2′fluoro-modified pyrimidines; the odd-numbered positions of the antisense strand comprise 2′-O-methyl modified nucleotides; and the even-numbered positions of the antisense strand comprise 2′fluoro-modified nucleotides and unmodified deoxyribonucleotide.

[0064] In some embodiments, the moiety includes a negatively charged group attached at a 5′ end of the oligonucleotide. This may be referred to as a 5′-end group. In some embodiments, the negatively charged group is attached at a 5′ end of an antisense strand of an siRNA disclosed herein. The 5′-end group may be or include a 5′-end phosphorothioate, 5′-end phosphorodithioate, 5′-end vinylphosphonate (5′-VP), 5′-end methylphosphonate, 5′-end cyclopropyl phosphonate, or a 5′-deoxy-5′-C-malonyl. The 5′-end group may comprise 5′-VP. In some embodiments, the 5′-VP comprises a trans-vinylphosphate or cis-vinylphosphate. The 5′-end group may include an extra 5′ phosphate. A combination of 5′-end groups may be used.

[0065] In some embodiments, the oligonucleotide includes a negatively charged group. The negatively charged group may aid in cell or tissue penetration. The negatively charged group may be attached at a 5′ or 3′ end (e.g. a 5′ end) of the oligonucleotide. This may be referred to as an end group. The end group may be or include a phosphorothioate, phosphorodithioate, vinylphosphonate, methylphosphonate, cyclopropyl phosphonate, or a deoxy-C-malonyl. The end group may include an extra 5′ phosphate such as an extra 5′ phosphate. A combination of end groups may be used.

[0066] In some embodiments, the oligonucleotide includes a phosphate mimic. In some embodiments, the phosphate mimic comprises vinyl phosphonate. In some embodiments, the vinyl phosphonate comprises a trans-vinylphosphate. In some embodiments, the vinyl phosphonate comprises a cis-vinylphosphate. An example of a nucleotide that includes a vinyl phosphonate is shown below.

[chemical structure]

[0067] In some embodiments, the vinyl phosphonate increases the stability of the oligonucleotide. In some embodiments, the vinyl phosphonate increases the accumulation of the oligonucleotide in tissues. In some embodiments, the vinyl phosphonate protects the oligonucleotide from an exonuclease or a phosphatase. In some embodiments, the vinyl phosphonate improves the binding affinity of the oligonucleotide with the siRNA processing machinery.

[0068] In some embodiments, the oligonucleotide includes 1 vinyl phosphonate. In some embodiments, the oligonucleotide includes 2 vinyl phosphonates. In some embodiments, the oligonucleotide includes 3 vinyl phosphonates. In some embodiments, the oligonucleotide includes 4 vinyl phosphonates. In some embodiments, the antisense strand of the oligonucleotide comprises a vinyl phosphonate at the 5′ end. In some embodiments, the antisense strand of the oligonucleotide comprises a vinyl phosphonate at the 3′ end. In some embodiments, the sense strand of the oligonucleotide comprises a vinyl phosphonate at the 5′ end. In some embodiments, the sense strand of the oligonucleotide comprises a vinyl phosphonate at the 3′ end.

### 1. Hydrophobic Moieties

[0069] In some embodiments, the composition comprises an oligonucleotide that inhibits the expression of MST1R, wherein the oligonucleotide comprises a hydrophobic moiety. The hydrophobic moiety may be attached at a 3′ or 5′ terminus of the oligonucleotide. The hydrophobic moiety may include a lipid such as a fatty acid. The hydrophobic moiety may include a hydrocarbon. The hydrocarbon may be linear. The hydrocarbon may be non-linear. The hydrophobic moiety may include a lipid moiety or a cholesterol moiety, or a combination thereof.

[0070] In some embodiments, the composition comprises an oligonucleotide that inhibits the expression of MST1R, wherein the oligonucleotide comprises a lipid attached at a 3′ or 5′ terminus of the oligonucleotide. In some embodiments, the lipid comprises cholesterol, myristoyl, palmitoyl, stearoyl, lithocholoyl, docosanoyl, docosahexaenoyl, myristyl, palmityl, stearyl, or α-tocopherol, or a combination thereof.

[0071] In some embodiments, the composition comprises an oligonucleotide that inhibits the expression of MST1R, wherein the oligonucleotide comprises a hydrophobic ligand or moiety. In some embodiments, the hydrophobic ligand or moiety comprises cholesterol. In some embodiments, the hydrophobic ligand or moiety comprises a cholesterol derivative. In some embodiments, the hydrophobic ligand or moiety is attached at a 3′ terminus of the oligonucleotide. In some embodiments, the hydrophobic ligand or moiety s attached at a 5′ terminus of the oligonucleotide. In some embodiments, the composition comprises a sense strand, and the hydrophobic ligand or moiety is attached to the sense strand (e.g. attached to a 5′ end of the sense strand, or attached to a 3′ end of the sense strand). In some embodiments, the composition comprises an antisense strand, and the hydrophobic ligand or moiety is attached to the antisense strand (e.g. attached to a 5′ end of the antisense strand, or attached to a 3′ end of the antisense strand). In some embodiments, the composition comprises a hydrophobic ligand or moiety attached at a 3′ or 5′ terminus of the oligonucleotide.

[0072] In some embodiments, a hydrophobic moiety is attached to the oligonucleotide (e.g. a sense strand and/or an antisense strand of a siRNA). In some embodiments, a hydrophobic moiety is attached at a 3′ terminus of the oligonucleotide. In some embodiments, a hydrophobic moiety is attached at a 5′ terminus of the oligonucleotide. In some embodiments, the hydrophobic moiety comprises cholesterol. In some embodiments, the hydrophobic moiety includes a cyclohexanyl.

[0073] In some embodiments, the composition comprises an oligonucleotide that inhibits the expression of MST1R, wherein the oligonucleotide comprises a lipid attached at a 3′ or 5′ terminus of the oligonucleotide. In some embodiments, a lipid is attached at a 3′ terminus of the oligonucleotide. In some embodiments, a lipid is attached at a 5′ terminus of the oligonucleotide. In some embodiments, the lipid comprises cholesterol, myristoyl, palmitoyl, stearoyl, lithocholoyl, docosanoyl, docosahexaenoyl, myristyl, palmityl, stearyl, or α-tocopherol, or a combination thereof. In some embodiments, the lipid comprises stearyl, lithocholyl, docosanyl, docosahexaenyl, or myristyl. In some embodiments, the lipid comprises cholesterol. In some embodiments, the lipid includes a sterol such as cholesterol. In some embodiments, the lipid comprises stearyl, t-butylphenol, n-butylphenol, octylphenol, dodecylphenol, phenyl n-dodecyl, octadecylbenzamide, hexadecylbenzamide, or octadecylcyclohexyl. In some embodiments, the lipid comprises phenyl para C12.

[0074] In some embodiments, the oligonucleotide comprises any aspect of the following structure:

[chemical structure]

[0075] In some embodiments, the oligonucleotide comprises any aspect of the following structure:

[chemical structure]

[0076] In some embodiments, the oligonucleotide comprises any aspect of the following structure:

[chemical structure]

[0077] In some embodiments, the oligonucleotide comprises any aspect of the following structure: The aspect included in the oligonucleotide may include the entire structure, or may include the lipid moiety, of any of the structures shown. In some embodiments, n is 1-3. In some embodiments, n is 1. In some embodiments, n is 2. In some embodiments, n is 3. In some embodiments, R is an alkyl group. In some embodiments, the alkyl group contains 1, 2, 3, 4, 5, 6, 7, 8, 9, 10, 11, 12, 13, 14, 15, 16, 17, 18, 19, or 20 carbons. In some embodiments, the alkyl group contains 4, 5, 6, 7, 8, 9, 10, 11, 12, 13, 14, 15, 16, 17, or 18 carbons, or a range defined by any two of the aforementioned numbers of carbons. In some embodiments, the alkyl group contains 4-18 carbons. In some embodiments, the lipid moiety comprises an alcohol or ether.

[0078] In some embodiments, the lipid includes a fatty acid. In some embodiments, the lipid comprises a lipid depicted in Table 1. The example lipid moieties in Table 1 are shown attached at a 5′ end of an oligonucleotide, in which the 5′ terminal phosphate of the oligonucleotide is shown with the lipid moiety. In some embodiments, a lipid moiety in Table 1 may be attached at a different point of attachment than shown. For example, the point of attachment of any of the lipid moieties in the table may be at a 3′ oligonucleotide end. In some embodiments, the lipid is used for targeting the oligonucleotide to a non-hepatic cell or tissue.

TABLE 1
Hydrophobic moiety examples

| Hydrophobic | Hydrophobic | |
|---|---|---|
| Moiety Description | Moiety Name | Example Conjugation |
| stearyl | ETL3 | [chemical structure] |
| t-butylphenyl | ETL7 | [chemical structure] |
| n-butylphenyl | ETL8 | [chemical structure] |
| octylphenyl | ETL9 | [chemical structure] |
| dodecylphenyl | ETL10 | [chemical structure] |
| phenyl n-dodecyl | ETL 12 | [chemical structure] |
| octadecylbenzamide | ETL13 | [chemical structure] |
| hexadecylbenzamide | ETL15 | [chemical structure] |
| octadecylcyclohexyl | ETL16 | [chemical structure] |

[0079] In some embodiments, the lipid or lipid moiety includes 16 to 18 carbons. In some embodiments, the lipid includes 16 carbons. In some embodiments, the lipid includes 17 carbons. In some embodiments, the lipid includes 18 carbons. In some embodiments, the lipid moiety includes 16 carbons. In some embodiments, the lipid moiety includes 17 carbons. In some embodiments, the lipid moiety includes 18 carbons.

[0080] The hydrophobic moiety may include a linker that comprises a carbocycle. The carbocycle may be six-membered. Some examples of a carbocycle include phenyl or cyclohexyl. The linker may include a phenyl. The linker may include a cyclohexyl. The lipid may be attached to the carbocycle, which may in turn be attached at a phosphate (e.g. 5′ or 3′ phosphate) of the oligonucleotide. In some embodiments, the lipid or hydrocarbon, and the end of the sense are connected to the phenyl or cyclohexyl linker in the 1,4; 1,3; or 1,2 substitution pattern (e.g. the para, meta, or ortho phenyl configuration). In some embodiments, the lipid or hydrocarbon, and the end of the sense are connected to the phenyl or cyclohexyl linker in the 1,4 substitution pattern (e.g. the para phenyl configuration). The lipid may be attached to the carbocycle in the 1,4 substitution pattern relative to the oligonucleotide. The lipid may be attached to the carbocycle in the 1,3 substitution pattern relative to the oligonucleotide. The lipid may be attached to the carbocycle in the 1,2 substitution pattern relative to the oligonucleotide. The lipid may be attached to the carbocycle in the ortho orientation relative to the oligonucleotide. The lipid may be attached to the carbocycle in the para orientation relative to the oligonucleotide. The lipid may be attached to the carbocycle in the meta orientation relative to the oligonucleotide.

[0081] The lipid moiety may comprise or consist of the following structure:

[chemical structure]

[0082] In some embodiments, the lipid moiety comprises or consists of the following structure:

[chemical structure]

[0083] In some embodiments, the lipid moiety comprises the following structure:

[chemical structure]

[0084] In some embodiments, the lipid moiety comprises or consist of the following structure:

[chemical structure]

[0085] In some embodiments, the dotted line indicates a covalent connection. The covalent connection may between an end of the sense or antisense strand. For example, the connection may be to the 5′ end of the sense strand. In some embodiments, n is 0-3. In some embodiments, n is 1-3. In some embodiments, n is 0. In some embodiments, n is 1. In some embodiments, n is 2. In some embodiments, n is 3. In some embodiments, n is 4. In some embodiments, n is 5. In some embodiments, n is 1, 2, 3, 4, 5, 6, 7, 8, 9, or 10. In some embodiments, R is an alkyl group. In some embodiments, the alkyl group contains 1, 2, 3, 4, 5, 6, 7, 8, 9, 10, 11, 12, 13, 14, 15, 16, 17, 18, 19, or 20 carbons. In some embodiments, the alkyl group contains 4, 5, 6, 7, 8, 9, 10, 11, 12, 13, 14, 15, 16, 17, or 18 carbons, or a range defined by any two of the aforementioned numbers of carbons. In some embodiments, R comprises or consists of an alkyl group containing 4-18 carbons.

[0086] The lipid moiety may be attached at a 5′ end of the oligonucleotide. The 5′ end may have one phosphate linking the lipid moiety to a 5′ carbon of a sugar of the oligonucleotide. The 5′ end may have two phosphates linking the lipid moiety to a 5′ carbon of a sugar of the oligonucleotide. The 5′ end may have three phosphates linking the lipid moiety to a 5′ carbon of a sugar of the oligonucleotide. The 5′ end may have one phosphate connected to the 5′ carbon of a sugar of the oligonucleotide, where the one phosphate is connected to the lipid moiety. The 5′ end may have two phosphates connected to the 5′ carbon of a sugar of the oligonucleotide, where the one of the two phosphates is connected to the lipid moiety. The 5′ end may have three phosphates connected to the 5′ carbon of a sugar of the oligonucleotide, where the one of the three phosphates is connected to the lipid moiety. The sugar may include a ribose. The sugar may include a deoxyribose. The sugar may be modified a such as a 2′ modified sugar (e.g. a 2′ O-methyl or 2′ fluoro ribose). A phosphate of the 5′ end may include a modification such as a sulfur in place of an oxygen. Two phosphates of the 5′ end may include a modification such as a sulfur in place of an oxygen. Three phosphates of the 5′ end may include a modification such as a sulfur in place of an oxygen.

[0087] In some embodiments, the oligonucleotide includes 1 lipid moiety. In some embodiments, the oligonucleotide includes 2 lipid moieties. In some embodiments, the oligonucleotide includes 3 lipid moieties. In some embodiments, the oligonucleotide includes 4 lipid moieties.

[0088] Some embodiments relate to a method of making an oligonucleotide comprising a hydrophobic conjugate. A strategy for making hydrophobic conjugates may include use of a phosphoramidite reagent based upon a 6-membered ring alcohol such as a phenol or cyclohexanol. The phosphoramidite may be reacted to a nucleotide to connect the nucleotide to the hydrophobic moiety, and thereby produce the hydrophobic conjugate. Some examples of phosphoramidite reagents that may be used to produce a hydrophobic conjugate are provided as follows:

[chemical structure]

[0089] In some embodiments, n is 1-3. In some embodiments, n is 1. In some embodiments, n is 2. In some embodiments, n is 3. In some embodiments, R is an alkyl group. In some embodiments, the alkyl group contains 1, 2, 3, 4, 5, 6, 7, 8, 9, 10, 11, 12, 13, 14, 15, 16, 17, 18, 19, or 20 carbons. In some embodiments, the alkyl group contains 4, 5, 6, 7, 8, 9, 10, 11, 12, 13, 14, 15, 16, 17, or 18 carbons, or a range defined by any two of the aforementioned numbers of carbons. In some embodiments, R comprises or consists of an alkyl group containing 4-18 carbons. Any one of the phosphoramidite reagents may be reacted to a 5′ end of an oligonucleotide to produce an oligonucleotide comprising a hydrophobic moiety. In some embodiments, the phosphoramidite reagents is reacted to a 5′ end of a sense strand of an siRNA. The sense strand may then be hybridized to an antisense strand to form a duplex. The hybridization may be performed by incubating the sense and antisense strands in solution at a given temperature. The temperature may be gradually reduced. The temperature may comprise or include a temperature comprising an annealing temperature for the sense and antisense strands. The temperature may be below or include a temperature below the annealing temperature for the sense and antisense strands. The temperature may be below a melting temperature of the sense and antisense strands.

[0090] The lipid may be attached to the oligonucleotide by a linker. The linker may include a polyethyleneglycol (e.g. tetraethyleneglycol).

[0091] The modifications described herein may be useful for delivery to a cell or tissue, for example, extrahepatic delivery or targeting of an oligonucleotide composition. The modifications described herein may be useful for targeting an oligonucleotide composition to a cell or tissue.

### 2. Sugar Moieties

[0092] In some embodiments, the composition comprises an oligonucleotide that inhibits the expression of MST1R, wherein the oligonucleotide comprises a sugar moiety. The sugar moiety may include an N-acetyl galactose moiety (e.g. an N-acetylgalactosamine (GalNAc) moiety), an N-acetyl glucose moiety (e.g. an N-acetylglucosamine (GlcNAc) moiety), a fucose moiety, or a mannose moiety. The sugar moiety may include 1, 2, 3, or more sugar molecules. The sugar moiety may be attached at a 3′ or 5′ terminus of the oligonucleotide. The sugar moiety may include an N-acetyl galactose moiety. The sugar moiety may include an N-acetylgalactosamine (GalNAc) moiety. The sugar moiety may include an N-acetyl glucose moiety. The sugar moiety may include N-acetylglucosamine (GlcNAc) moiety. The sugar moiety may include a fucose moiety. The sugar moiety may include a mannose moiety. N-acetyl glucose, GlcNAc, fucose, or mannose may be useful for targeting macrophages when they target or bind a mannose receptor such as CD206. The sugar moiety may be useful for binding or targeting an asialoglycoprotein receptor such as an asialoglycoprotein receptor of a hepatocyte. The GalNAc moiety may bind to an asialoglycoprotein receptor. The GalNAc moiety may target a hepatocyte.

[0093] In some embodiments, the composition comprises an oligonucleotide that inhibits the expression of MST1R, wherein the oligonucleotide comprises an N-acetylgalactosamine (GalNAc) moiety. GalNAc may be useful for hepatocyte targeting. The GalNAc moiety may include a bivalent or trivalent branched linker. The oligo may be attached to 1, 2 or 3 GalNAcs through a bivalent or trivalent branched linker. The GalNAc moiety may include 1, 2, 3, or more GalNAc molecules. The GalNAc moiety may be attached at a 3′ or 5′ terminus of the oligonucleotide.

[0094] In some embodiments, the composition comprises an oligonucleotide that inhibits the expression of MST1R, wherein the oligonucleotide comprises an N-acetylgalactosamine (GalNAc) ligand for hepatocyte targeting. In some embodiments, the composition comprises GalNAc. In some embodiments, the composition comprises a GalNAc derivative. In some embodiments, the GalNAc ligand is attached at a 3′ terminus of the oligonucleotide. In some embodiments, the GalNAc ligand is attached at a 5′ terminus of the oligonucleotide. In some embodiments, the composition comprises a sense strand, and the GalNAc ligand is attached to the sense strand (e.g. attached to a 5′ end of the sense strand, or attached to a 3′ end of the sense strand). In some embodiments, the composition comprises an antisense strand, and the GalNAc ligand is attached to the antisense strand (e.g. attached to a 5′ end of the antisense strand, or attached to a 3′ end of the antisense strand). In some embodiments, the composition comprises a GalNAc ligand attached at a 3′ or 5′ terminus of the oligonucleotide.

[0095] Disclosed herein, in some embodiments, are compositions comprising an oligonucleotide that inhibits the expression of MST1R, wherein the oligonucleotide comprises a GalNAc moiety. The GalNAc moiety may be included in any formula, structure, or GalNAc moiety shown below. In some embodiments, described herein is a compound (e.g. oligonucleotide) represented by Formula (I) or (II):

[chemical structure]

[0096] or a salt thereof, wherein
[0097] J is an oligonucleotide;
[0098] each w is independently selected from any value from 1 to 20;
[0099] each v is independently selected from any value from 1 to 20;
[0100] n is selected from any value from 1 to 20;
[0101] m is selected from any value from 1 to 20;
[0102] z is selected from any value from 1 to 3, wherein
   [0103] if z is 3, Y is C
   [0104] if z is 2, Y is CR⁶, or
   [0105] if z is 1, Y is C(R⁶)₂;
[0106] Q is selected from:
   [0107] C₃₋₁₀ carbocycle optionally substituted with one or more substituents independently selected from halogen, —CN, —NO₂, —OR⁷, —SR⁷, —N(R⁷)₂, —C(O)R⁷, —C(O)N(R⁷)₂, —N(R⁷)C(O)R⁷, —N(R⁷)C(O)N(R⁷)₂, —OC(O)N(R⁷)₂, —N(R⁷)C(O)OR⁷, —C(O)OR⁷, —OC(O)R⁷, —S(O)R⁷, and C₁₋₆ alkyl, wherein the C₁₋₆ alkyl, is optionally substituted with one or more substituents independently selected from halogen, —CN, —OH, —SH, —NO₂, and —NH₂;
[0108] R¹ is a linker selected from:
   [0109] —O—, —S—, —N(R⁷)—, —C(O)—, —C(O)N(R⁷)—, —N(R⁷)C(O)—, —N(R⁷)C(O)N(R⁷)—, —OC(O)N(R⁷)—, —N(R⁷)C(O)O—, —C(O)O—, —OC(O)—, —S(O)—, —S(O)₂—, —OS(O)₂—, —OP(O)(OR⁷)O—, —SP(O)(OR⁷)O—, —OP(S)(OR⁷)O—, —OP(O)(SR⁷)O—, —OP(O)(OR⁷)S—, —OP(O)(O⁻)O—, —SP(O)(O⁻)O—, —OP(S)(O⁻)O—, —OP(O)(S⁻)O—, —OP(O)(O⁻)S—, —OP(O)(OR⁷)NR⁷—, —OP(O)(N(R⁷)₂)NR⁷—, —OP(OR⁷)O—, —OP(N(R⁷)₂)O—, —OP(OR⁷)N(R⁷)—, and —OPN(R⁷)₂NR⁷—;
[0110] each R² is independently selected from:
   [0111] C₁₋₆ alkyl optionally substituted with one or more substituents independently selected from halogen, —OR⁷, —SR⁷, —N(R⁷)₂, —C(O)R⁷, —C(O)N(R⁷)₂, —N(R⁷)C(O)R⁷, —N(R⁷)C(O)N(R⁷)₂, —OC(O)N(R⁷)₂, —N(R⁷)C(O)OR⁷, —C(O)OR⁷, —OC(O)R⁷, and —S(O)R⁷;
[0112] R³ and R⁴ are each independently selected from:
   [0113] —OR⁷, —SR⁷, —N(R⁷)₂, —C(O)R⁷, —C(O)N(R⁷)₂, —N(R⁷)C(O)R⁷, —N(R⁷)C(O)N(R⁷)₂, —OC(O)N(R⁷)₂, —N(R⁷)C(O)OR⁷, —C(O)OR⁷, —OC(O)R⁷, and —S(O)R⁷;
[0114] each R⁵ is independently selected from:
   [0115] —OC(O)R⁷, —OC(O)N(R⁷)₂, —N(R⁷)C(O)R⁷, —N(R⁷)C(O)N(R⁷)₂, —N(R⁷)C(O)OR⁷, —C(O)R⁷, —C(O)OR⁷, and —C(O)N(R⁷)₂;
[0116] each R⁶ is independently selected from:
   [0117] hydrogen;
   [0118] halogen, —CN, —NO₂, —OR⁷, —SR⁷, —N(R⁷)₂, —C(O)R⁷, —C(O)N(R⁷)₂, —N(R⁷)C(O)R⁷, —N(R⁷)C(O)N(R⁷)₂, —OC(O)N(R⁷)₂, —N(R⁷)C(O)OR⁷, —C(O)OR⁷, —OC(O)R⁷, and —S(O)R⁷; and
   [0119] C₁₋₆ alkyl optionally substituted with one or more substituents independently selected from halogen, —CN, —NO₂, —OR⁷, —SR⁷, —N(R⁷)₂, —C(O)R⁷, —C(O)N(R⁷)₂, —N(R⁷)C(O)R⁷, —N(R⁷)C(O)N(R⁷)₂, —OC(O)N(R⁷)₂, —N(R⁷)C(O)OR⁷, —C(O)OR⁷, —OC(O)R⁷, and —S(O)R⁷;
[0120] each R⁷ is independently selected from:
   [0121] hydrogen;
   [0122] C₁₋₆ alkyl, C₂₋₆ alkenyl, and C₂₋₆ alkynyl, each of which is optionally substituted with one or more substituents independently selected from halogen, —CN, —OH, —SH, —NO₂, —NH₂, =O, ═S, —O—C₁₋₆ alkyl, —S—C₁₋₆ alkyl, —N(C₁₋₆ alkyl)₂, —NH(C₁₋₆ alkyl), C₃₋₁₀ carbocycle, and 3- to 10-membered heterocycle; and
   [0123] C₃₋₁₀ carbocycle, and 3- to 10-membered heterocycle, each of which is optionally substituted with one or more substituents independently selected from halogen, —CN, —OH, —SH, —NO₂, —NH₂, =O, ═S, —O—C₁₋₆ alkyl, —S—C₁₋₆ alkyl, —N(C₁₋₆ alkyl)₂, —NH(C₁₋₆ alkyl), C₁₋₆ alkyl, C₂₋₆ alkenyl, C₂₋₆alkynyl, C₃₋₁₀carbocycle, 3- to 10-membered heterocycle, and C₁₋₆haloalkyl.

[0124] In some embodiments, each w is independently selected from any value from 1 to 10. In some embodiments, each w is independently selected from any value from 1 to 5. In some embodiments, each w is 1. In some embodiments, each v is independently selected from any value from 1 to 10. In some embodiments, each v is independently selected from any value from 1 to 5. In some embodiments, each v is 1. In some embodiments, n is selected from any value from 1 to 10. In some embodiments, n is selected from any value from 1 to 5. In some embodiments, n is 2. In some embodiments, m is selected from any value from 1 to 10. In some embodiments, m is selected from any value from 1 to 5. In some embodiments, m is selected from 1 and 2. In some embodiments, z is 3 and Y is C. In some embodiments, Q is selected from C₅₋₆ carbocycle optionally substituted with one or more substituents independently selected from halogen, —CN, —NO₂, —OR⁷, —SR⁷, —N(R⁷)₂, —C(O)R⁷, —C(O)N(R⁷)₂, —N(R⁷)C(O)R⁷, —N(R⁷)C(O)N(R⁷)₂, —OC(O)N(R⁷)₂, —N(R⁷)C(O)OR⁷, —C(O)OR⁷, —OC(O)R⁷, and —S(O)R⁷. In some embodiments, Q is selected from C₅₋₆ carbocycle optionally substituted with one or more substituents independently selected from halogen, —CN, —OH, —SH, —NO₂, and —NH₂. In some embodiments, Q is selected from phenyl and cyclohexyl, each of which is optionally substituted with one or more substituents independently selected from halogen, —CN, —OH, —SH, —NO₂, and —NH₂. In some embodiments, Q is selected from phenyl. In some embodiments, Q is selected from cyclohexyl. In some embodiments, R¹ is selected from —OP(O)(OR⁷)O—, —SP(O)(OR⁷)O—, —OP(S)(OR⁷)O—, —OP(O)(SR⁷)O—, —OP(O)(OR⁷)S—, —OP(O)(O⁻)O—, —SP(O)(O⁻)O—, —OP(S)(O⁻)O—, —OP(O)(S⁻)O—, —OP(O)(O⁻)S—, —OP(O)(OR⁷)NR⁷—, —OP(O)(N(R⁷)₂)NR⁷—, —OP(OR⁷)O—, —OP(N(R⁷)₂)O—, —OP(OR⁷)N(R⁷)—, and —OPN(R⁷)₂—NR⁷. In some embodiments, R¹ is selected from —OP(O)(OR⁷)O—, —SP(O)(OR⁷)O—, —OP(S)(OR⁷)O—, —OP(O)(SR⁷)O—, —OP(O)(OR⁷)S—, —OP(O)(O⁻)O—, —SP(O)(O⁻)O—, —OP(S)(O⁻)O—, —OP(O)(S⁻)O—, —OP(O)(O⁻)S—, and —OP(OR⁷)O—. In some embodiments, R¹ is selected from —OP(O)(OR⁷)O—, —OP(S)(OR⁷)O—, —OP(O)(O⁻)O—, —OP(S)(O⁻)O—, —OP(O)(S⁻)O—, and —OP(OR⁷)O—. In some embodiments, R¹ is selected from —OP(O)(OR⁷)O— and —OP(OR⁷)O—. In some embodiments, R² is selected from C₁₋₃ alkyl substituted with one or more substituents independently selected from halogen, —OR⁷, —OC(O)R⁷, —SR⁷, —N(R⁷)₂, —C(O)R⁷, and —S(O)R⁷. In some embodiments, R² is selected from C₁₋₃ alkyl substituted with one or more substituents independently selected from —OR⁷, —OC(O)R⁷, —SR⁷, and —N(R⁷)₂. In some embodiments, R² is selected from C₁₋₃ alkyl substituted with one or more substituents independently selected from —OR⁷ and —OC(O)R⁷. In some embodiments, R³ is selected from halogen, —OR⁷, —SR⁷, —N(R⁷)₂, —C(O)R⁷, —OC(O)R⁷, and —S(O)R⁷. In some embodiments, R³ is selected from —OR⁷—SR⁷, —OC(O)R⁷, and —N(R⁷)₂. In some embodiments, R³ is selected from —OR²— and —OC(O)R⁷. In some embodiments, R⁴ is selected from halogen, —OR⁷, —SR⁷, —N(R⁷)₂, —C(O)R⁷, —OC(O)R⁷, and —S(O)R⁷. In some embodiments, R⁴ is selected from —OR⁷—SR⁷, —OC(O)R⁷, and —N(R⁷)₂. In some embodiments, R⁴ is selected from —OR⁷— and —OC(O)R⁷. In some embodiments, R⁵ is selected from —OC(O)R⁷, —OC(O)N(R⁷)₂, —N(R⁷)C(O)R⁷, —N(R⁷)C(O)N(R⁷)₂, and —N(R⁷)C(O)OR⁷. In some embodiments, R⁵ is selected from —OC(O)R⁷ and —N(R⁷)C(O)R⁷. In some embodiments, each R⁷ is independently selected from: hydrogen; and C₁₋₆ alkyl optionally substituted with one or more substituents independently selected from halogen, —CN, —OH, —SH, —NO₂, —NH₂, =O, ═S, —O—C₁₋₆ alkyl, —S—C₁₋₆ alkyl, —N(C₁₋₆ alkyl)₂, —NH(C₁₋₆ alkyl), C₃₋₁₀ carbocycle, or 3- to 10-membered heterocycle. In some embodiments, each R⁷ is independently selected from C₁₋₆ alkyl optionally substituted with one or more substituents independently selected from halogen, —CN, —OH, —SH, —NO₂, —NH₂, =O, ═S, —O—C₁₋₆ alkyl, —S—C₁₋₆ alkyl, —N(C₁₋₆ alkyl)₂, and —NH(C₁₋₆ alkyl). In some embodiments, each R⁷ is independently selected from C₁₋₆ alkyl optionally substituted with one or more substituents independently selected from halogen, —CN, —OH, and —SH. In some embodiments, w is 1; v is 1; n is 2; m is 1 or 2; z is 3 and Y is C; Q is phenyl or cyclohexyl, each of which is optionally substituted with one or more substituents independently selected from halogen, —CN, —OH, —SH, —NO₂, —NH₂, and C₁₋₃ alkyl; R¹ is selected from —OP(O)(OR⁷)O—, —OP(S)(OR⁷)O—, —OP(O)(O—)O—, —OP(S)(O—)O—, —OP(O)(S—)O—, and —OP(OR⁷)O—; R² is C₁ alkyl substituted with —OH or —OC(O)CH₃;
[0125] R³ is —OH or —OC(O)CH₃; R⁴ is —OH or —OC(O)CH₃; and R⁵ is —NH(O)CH₃. In some embodiments, the compound comprises:

[chemical structure]

[chemical structure]

[chemical structure]

[chemical structure]

[chemical structure]

[chemical structure]

[chemical structure]

[chemical structure]

[chemical structure]

[chemical structure]

[chemical structure]

[chemical structure]

[chemical structure]

[chemical structure]

[chemical structure]

[chemical structure]

[0126] In some embodiments, the oligonucleotide (J) is attached at a 5′ end or a 3′ end of the oligonucleotide. In some embodiments, the oligonucleotide comprises DNA. In some embodiments, the oligonucleotide comprises RNA. In some embodiments, the oligonucleotide comprises one or more modified internucleoside linkages. In some embodiments, the one or more modified internucleoside linkages comprise alkylphosphonate, phosphorothioate, methylphosphonate, phosphorodithioate, alkylphosphonothioate, phosphoramidate, carbamate, carbonate, phosphate triester, acetamidate, or carboxymethyl ester, or a combination thereof. In some embodiments, the oligonucleotide comprises 1, 2, 3, 4, 5, 6, 7, 8, 9, 10, 11, 12, 13, 14, 15, 16, 17, 18, 19, or 20 modified internucleoside linkages. In some embodiments, the compound binds to an asialoglycoprotein receptor. In some embodiments, the compound targets a hepatocyte.

[0127] Some embodiments include the following, where J is the oligonucleotide:

[chemical structure]

J may include one or more additional phosphates, or one or more phosphorothioates linking to the oligonucleotide. J may include one or more additional phosphates linking to the oligonucleotide. J may include one or more phosphorothioates linking to the oligonucleotide.

[0128] Some embodiments include the following, where J is the oligonucleotide:

[chemical structure]

J may include one or more additional phosphates, or one or more phosphorothioates linking to the oligonucleotide. J may include one or more additional phosphates linking to the oligonucleotide. J may include one or more phosphorothioates linking to the oligonucleotide.

[0129] Some embodiments include the following, where J is the oligonucleotide:

[chemical structure]

J may include one or more phosphates or phosphorothioates linking to the oligonucleotide. J may include one or more phosphates linking to the oligonucleotide. J may include a phosphate linking to the oligonucleotide. J may include one or more phosphorothioates linking to the oligonucleotide. J may include a phosphorothioate linking to the oligonucleotide.

[0130] Some embodiments include the following, where J is the oligonucleotide:

[chemical structure]

The structure in this compound attached to the oligonucleotide (J) may be referred to as “ETL17,” and is an example of a GalNAc moiety. J may include one or more phosphates or phosphorothioates linking to the oligonucleotide. J may include one or more phosphates linking to the oligonucleotide. J may include a phosphate linking to the oligonucleotide. J may include one or more phosphorothioates linking to the oligonucleotide. J may include a phosphorothioate linking to the oligonucleotide.

[0131] Some embodiments include the following, where the phosphate or “5′” indicates a connection to the oligonucleotide:

[chemical structure]

[0132] Some embodiments include the following, where the phosphate or “5′” indicates a connection to the oligonucleotide:

[chemical structure]

[0133] Some embodiments include the following, where J is the oligonucleotide:

[chemical structure]

include one or more phosphates or phosphorothioates linking to the oligonucleotide. J may include one or more phosphates linking to the oligonucleotide. J may include a phosphate linking to the oligonucleotide. J may include one or more phosphorothioates linking to the oligonucleotide. J may include a phosphorothioate linking to the oligonucleotide.

[0134] Some embodiments include the following, where J is the oligonucleotide:

[chemical structure]

[0135] The structure in this compound attached to the oligonucleotide (J) may be referred to as “ETL1,” and is an example of a GalNAc moiety. J may include one or more phosphates or phosphorothioates linking to the oligonucleotide. J may include one or more phosphates linking to the oligonucleotide. J may include a phosphate linking to the oligonucleotide. J may include one or more phosphorothioates linking to the oligonucleotide. J may include a phosphorothioate linking to the oligonucleotide.

3. siRNA Modification Patterns

[0136] In some embodiments, the composition comprises an oligonucleotide that inhibits the expression of MST1R, wherein the oligonucleotide comprises an siRNA comprising a sense strand and an antisense strand, wherein the sense strand comprises modification pattern 1S: 5′-NfsnsNfnNfnNfNfNfnNfnNfnNfnNfnNfsnsn-3′ (SEQ ID NO: 9819), wherein “Nf” is a 2′ fluoro-modified nucleoside, “n” is a 2′ O-methyl modified nucleoside, and “s” is a phosphorothioate linkage. In some embodiments, the sense strand comprises modification pattern 2S: 5′-nsnsnnNfnNfNfNfnnnnnnnnnnsnsn-3′ (SEQ ID NO: 9820), wherein “Nf” is a 2′ fluoro-modified nucleoside, “n” is a 2′ O-methyl modified nucleoside, and “s” is a phosphorothioate linkage. In some embodiments, the sense strand comprises modification pattern 3S: 5′-nsnsnnNfnNfnNfnnnnnnnnnnsnsn-3′ (SEQ ID NO: 9821), wherein “Nf” is a 2′ fluoro-modified nucleoside, “n” is a 2′ O-methyl modified nucleoside, and “s” is a phosphorothioate linkage. In some embodiments, the sense strand comprises modification pattern 4S: 5′-NfsnsNfnNfnNfNfNfnNfnNfnNfnNfnNfsnsnN-moiety-3′ (SEQ ID NO: 9822), wherein “Nf” is a 2′ fluoro-modified nucleoside, “n” is a 2′ O-methyl modified nucleoside, “s” is a phosphorothioate linkage, and N comprises one or more nucleosides. In some embodiments, the sense strand comprises modification pattern 5S: 5′-nsnsnnNfnNfNfNfnnnnnnnnnnsnsnN-moiety-3′ (SEQ ID NO: 9823), wherein “Nf” is a 2′ fluoro-modified nucleoside, “n” is a 2′ O-methyl modified nucleoside, “s” is a phosphorothioate linkage, and N comprises one or more nucleosides. In some embodiments, the moiety in modification pattern 4S or 5S includes an integrin targeting ligand. In some embodiments, the moiety in modification pattern 4S or 5S is a sugar moiety. In some embodiments, the sense strand comprises modification pattern 6S: 5′-NfsnsNfnNfnNfnNfnNfnNfnNfnNfnNfsnsn-3′ (SEQ ID NO: 9824), wherein “Nf” is a 2′ fluoro-modified nucleoside, “n” is a 2′ O-methyl modified nucleoside, and “s” is a phosphorothioate linkage. In some embodiments, the sense strand comprises modification pattern 7S: 5′-nsnsnnNfNfNfNfNfnnnnnnnnnnsnsn-3′ (SEQ ID NO: 9825), wherein “Nf” is a 2′ fluoro-modified nucleoside, “n” is a 2′ O-methyl modified nucleoside, and “s” is a phosphorothioate linkage. In some embodiments, the sense strand comprises modification pattern 8S: 5′-nsnsnnnNfNfNfNfnnnnnnnnnnsnsn-3′ (SEQ ID NO: 9826), wherein “Nf” is a 2′ fluoro-modified nucleoside, “n” is a 2′ O-methyl modified nucleoside, and “s” is a phosphorothioate linkage. In some embodiments, the sense strand comprises modification pattern 9S: 5′-nsnsnnnnNfNfNfNfnnnnnnnnnsnsn-3′ (SEQ ID NO: 9827), wherein “Nf” is a 2′ fluoro-modified nucleoside, “n” is a 2′ O-methyl modified nucleoside, and “s” is a phosphorothioate linkage.

[0137] In some embodiments, the composition comprises an oligonucleotide that inhibits the expression of MST1R, wherein the oligonucleotide comprises an siRNA comprising a sense strand and an antisense strand, wherein the antisense strand comprises modification pattern 1AS: 5′-nsNfsnNfnNfnNfnNfnnnNfnNfnNfnsnsn-3′ (SEQ ID NO: 9828), wherein “Nf” is a 2′ fluoro-modified nucleoside, “n” is a 2′ O-methyl modified nucleoside, and “s” is a phosphorothioate linkage. In some embodiments, the antisense strand comprises modification pattern 2AS: 5′-nsNfsnnnNfnNfNfnnnnNfnNfnnnsnsn-3′ (SEQ ID NO: 9829), wherein “Nf” is a 2′ fluoro-modified nucleoside, “n” is a 2′ O-methyl modified nucleoside, and “s” is a phosphorothioate linkage. In some embodiments, the antisense strand comprises modification pattern 3AS: 5′-nsNfsnnnNfnnnnnnnNfnNfnnnsnsn-3′ (SEQ ID NO: 9830), wherein “Nf” is a 2′ fluoro-modified nucleoside, “n” is a 2′ O-methyl modified nucleoside, and “s” is a phosphorothioate linkage. In some embodiments, the antisense strand comprises modification pattern 4AS: 5′-nsNfsnNfnNfnnnnnnnNfnNfnnnsnsn-3′ (SEQ ID NO: 9831), wherein “Nf” is a 2′ fluoro-modified nucleoside, “n” is a 2′ O-methyl modified nucleoside, and “s” is a phosphorothioate linkage. In some embodiments, the antisense strand comprises modification pattern 5AS: 5′-nsNfsnnnnnnnnnnnNfnNfnnnsnsn-3′ (SEQ ID NO: 9832), wherein “Nf” is a 2′ fluoro-modified nucleoside, “n” is a 2′ O-methyl modified nucleoside, and “s” is a phosphorothioate linkage. In some embodiments, the antisense strand comprises modification pattern 6AS: 5′-nsNfsnnnNfnnNfnnnnNfnNfnnnsnsn-3′ (SEQ ID NO: 9833), wherein “Nf” is a 2′ fluoro-modified nucleoside, “n” is a 2′ O-methyl modified nucleoside, and “s” is a phosphorothioate linkage. In some embodiments, the antisense strand comprises modification pattern 7AS: 5′-nsNfsnNfnNfnNfnNfnNfnNfnNfnNfnsnsn-3′ (SEQ ID NO: 9834), wherein “Nf” is a 2′ fluoro-modified nucleoside, “n” is a 2′ O-methyl modified nucleoside, and “s” is a phosphorothioate linkage. In some embodiments, the antisense strand comprises modification pattern 8AS: 5′-nsNfsnnnnnnnnnnnNfnnnnnsnsn-3′ (SEQ ID NO: 9835), wherein “Nf” is a 2′ fluoro-modified nucleoside, “n” is a 2′ O-methyl modified nucleoside, and “s” is a phosphorothioate linkage.

[0138] In some embodiments, the composition comprises an oligonucleotide that inhibits the expression of MST1R, wherein the oligonucleotide comprises an siRNA comprising a sense strand and an antisense strand, wherein the sense strand comprises pattern 1S and the antisense strand comprises pattern 1AS, 2AS, 3AS, 4AS, 5AS, 6AS, 7AS, or 8AS. In some embodiments, the sense strand comprises pattern 2S and the antisense strand comprises pattern 1AS, 2AS, 3AS, 4AS, 5AS, 6AS, 7AS, or 8AS. In some embodiments, the sense strand comprises pattern 3S and the antisense strand comprises pattern 1AS, 2AS, 3AS, 4AS, 5AS, 6AS, 7AS, or 8AS. In some embodiments, the sense strand comprises pattern 4S and the antisense strand comprises pattern 1AS, 2AS, 3AS, 4AS, 5AS, 6AS, 7AS, or 8AS. In some embodiments, the sense strand comprises pattern 5S and the antisense strand comprises pattern 1AS, 2AS, 3AS, 4AS, 5AS, 6AS, 7AS, or 8AS. In some embodiments, the sense strand comprises pattern 6S and the antisense strand comprises pattern 1AS, 2AS, 3AS, 4AS, 5AS, 6AS, 7AS, or 8AS. In some embodiments, the sense strand comprises pattern 7S and the antisense strand comprises pattern 1AS, 2AS, 3AS, 4AS, 5AS, 6AS, 7AS, or 8AS. In some embodiments, the sense strand comprises pattern 8S and the antisense strand comprises pattern 1AS, 2AS, 3AS, 4AS, 5AS, 6AS, 7AS, or 8AS. In some embodiments, the sense strand comprises pattern 9S and the antisense strand comprises pattern 1AS, 2AS, 3AS, 4AS, 5AS, 6AS, 7AS, or 8AS.

[0139] In some embodiments, the sense strand comprises pattern 1S, 2S, 3S, 4S, 5S, 6S, 7S, 8S, or 9S and the antisense strand comprises pattern 1AS. In some embodiments, the sense strand comprises pattern 1S, 2S, 3S, 4S, 5S, 6S, 7S, 8S, or 9S and the antisense strand comprises pattern 2AS. In some embodiments, the sense strand comprises pattern 1S, 2S, 3S, 4S, 5S, 6S, 7S, 8S, or 9S and the antisense strand comprises pattern 3AS. In some embodiments, the sense strand comprises pattern 1S, 2S, 3S, 4S, 5S, 6S, 7S, 8S, or 9S and the antisense strand comprises pattern 4AS. In some embodiments, the sense strand comprises pattern 1S, 2S, 3S, 4S, 5S, 6S, 7S, 8S, or 9S and the antisense strand comprises pattern 5AS. In some embodiments, the sense strand comprises pattern 1S, 2S, 3S, 4S, 5S, 6S, 7S, 8S, or 9S and the antisense strand comprises pattern 6AS. In some embodiments, the sense strand comprises pattern 1S, 2S, 3S, 4S, 5S, 6S, 7S, 8S, or 9S and the antisense strand comprises pattern 7AS. In some embodiments, the sense strand comprises pattern 1S, 2S, 3S, 4S, 5S, 6S, 7S, 8S, or 9S and the antisense strand comprises pattern 8AS.

[0140] In some embodiments, the sense strand comprises modification pattern 1AS, 2AS, 3AS, 4AS, 5AS, 6AS, 7AS, or 8AS. In some embodiments, the antisense strand comprises modification pattern 1S, 2S, 3S, 4S, 5S, 6S, 7S, 8S, or 9S. In some embodiments, the sense strand or the antisense strand comprises modification pattern ASO1.

[0141] In some embodiments, purines of the sense strand comprise 2′ fluoro modified purines. In some embodiments, purines of the sense strand comprise 2′-O-methyl modified purines. In some embodiments, purines of the sense strand comprise a mixture of 2′ fluoro and 2′-O-methyl modified purines. In some embodiments, all purines of the sense strand comprise 2′ fluoro modified purines. In some embodiments, all purines of the sense strand comprise 2′-O-methyl modified purines. In some embodiments, all purines of the sense strand comprise a mixture of 2′ fluoro and 2′-O-methyl modified purines.

[0142] In some embodiments, pyrimidines of the sense strand comprise 2′ fluoro modified pyrimidines. In some embodiments, pyrimidines of the sense strand comprise 2′-O-methyl modified pyrimidines. In some embodiments, pyrimidines of the sense strand comprise a mixture of 2′ fluoro and 2′-O-methyl modified pyrimidines. In some embodiments, all pyrimidines of the sense strand comprise 2′ fluoro modified pyrimidines. In some embodiments, all pyrimidines of the sense strand comprise 2′-O-methyl modified pyrimidines. In some embodiments, all pyrimidines of the sense strand comprise a mixture of 2′ fluoro and 2′-O-methyl modified pyrimidines.

[0143] In some embodiments, purines of the sense strand comprise 2′ fluoro modified purines, and pyrimidines of the sense strand comprise a mixture of 2′ fluoro and 2′-O-methyl modified pyrimidines. In some embodiments, purines of the sense strand comprise 2′-O-methyl modified purines, and pyrimidines of the sense strand comprise a mixture of 2′ fluoro and 2′-O-methyl modified pyrimidines. In some embodiments, purines of the sense strand comprise 2′ fluoro modified purines, and pyrimidines of the sense strand comprise 2′-O-methyl modified pyrimidines. In some embodiments, purines of the sense strand comprise 2′-O-methyl modified purines, and pyrimidines of the sense strand comprise 2′ fluoro modified pyrimidines. In some embodiments, pyrimidines of the sense strand comprise 2′ fluoro modified pyrimidines, and purines of the sense strand comprise a mixture of 2′ fluoro and 2′-O-methyl modified purines. In some embodiments, pyrimidines of the sense strand comprise 2′-O-methyl modified pyrimidines, and purines of the sense strand comprise a mixture of 2′ fluoro and 2′-O-methyl modified purines. In some embodiments, pyrimidines of the sense strand comprise 2′ fluoro modified pyrimidines, and purines of the sense strand comprise 2′-O-methyl modified purines. In some embodiments, pyrimidines of the sense strand comprise 2′-O-methyl modified pyrimidines, and purines of the sense strand comprise 2′ fluoro modified purines.

[0144] In some embodiments, all purines of the sense strand comprise 2′ fluoro modified purines, and all pyrimidines of the sense strand comprise a mixture of 2′ fluoro and 2′-O-methyl modified pyrimidines. In some embodiments, all purines of the sense strand comprise 2′-O-methyl modified purines, and all pyrimidines of the sense strand comprise a mixture of 2′ fluoro and 2′-O-methyl modified pyrimidines. In some embodiments, all purines of the sense strand comprise 2′ fluoro modified purines, and all pyrimidines of the sense strand comprise 2′-O-methyl modified pyrimidines. In some embodiments, all purines of the sense strand comprise 2′-O-methyl modified purines, and all pyrimidines of the sense strand comprise 2′ fluoro modified pyrimidines. In some embodiments, all pyrimidines of the sense strand comprise 2′ fluoro modified pyrimidines, and all purines of the sense strand comprise a mixture of 2′ fluoro and 2′-O-methyl modified purines. In some embodiments, all pyrimidines of the sense strand comprise 2′-O-methyl modified pyrimidines, and all purines of the sense strand comprise a mixture of 2′ fluoro and 2′-O-methyl modified purines. In some embodiments, all pyrimidines of the sense strand comprise 2′ fluoro modified pyrimidines, and all purines of the sense strand comprise 2′-O-methyl modified purines. In some embodiments, all pyrimidines of the sense strand comprise 2′-O-methyl modified pyrimidines, and all purines of the sense strand comprise 2′ fluoro modified purines.

[0145] In some embodiments, purines of the antisense strand comprise 2′ fluoro modified purines. In some embodiments, purines of the antisense strand comprise 2′-O-methyl modified purines. In some embodiments, purines of the antisense strand comprise a mixture of 2′ fluoro and 2′-O-methyl modified purines. In some embodiments, all purines of the antisense strand comprise 2′ fluoro modified purines. In some embodiments, all purines of the antisense strand comprise 2′-O-methyl modified purines. In some embodiments, all purines of the antisense strand comprise a mixture of 2′ fluoro and 2′-O-methyl modified purines.

[0146] In some embodiments, pyrimidines of the antisense strand comprise 2′ fluoro modified pyrimidines. In some embodiments, pyrimidines of the antisense strand comprise 2′-O-methyl modified pyrimidines. In some embodiments, pyrimidines of the antisense strand comprise a mixture of 2′ fluoro and 2′-O-methyl modified pyrimidines. In some embodiments, all pyrimidines of the antisense strand comprise 2′ fluoro modified pyrimidines. In some embodiments, all pyrimidines of the antisense strand comprise 2′-O-methyl modified pyrimidines. In some embodiments, all pyrimidines of the antisense strand comprise a mixture of 2′ fluoro and 2′-O-methyl modified pyrimidines.

[0147] In some embodiments, purines of the antisense strand comprise 2′ fluoro modified purines, and pyrimidines of the antisense strand comprise a mixture of 2′ fluoro and 2′-O-methyl modified pyrimidines. In some embodiments, purines of the antisense strand comprise 2′-O-methyl modified purines, and pyrimidines of the antisense strand comprise a mixture of 2′ fluoro and 2′-O-methyl modified pyrimidines. In some embodiments, purines of the antisense strand comprise 2′ fluoro modified purines, and pyrimidines of the antisense strand comprise 2′-O-methyl modified pyrimidines. In some embodiments, purines of the antisense strand comprise 2′-O-methyl modified purines, and pyrimidines of the antisense strand comprise 2′ fluoro modified pyrimidines. In some embodiments, pyrimidines of the antisense strand comprise 2′ fluoro modified pyrimidines, and purines of the antisense strand comprise a mixture of 2′ fluoro and 2′-O-methyl modified purines. In some embodiments, pyrimidines of the antisense strand comprise 2′-O-methyl modified pyrimidines, and purines of the antisense strand comprise a mixture of 2′ fluoro and 2′-O-methyl modified purines. In some embodiments, pyrimidines of the antisense strand comprise 2′ fluoro modified pyrimidines, and purines of the antisense strand comprise 2′-O-methyl modified purines. In some embodiments, pyrimidines of the antisense strand comprise 2′-O-methyl modified pyrimidines, and purines of the antisense strand comprise 2′ fluoro modified purines.

[0148] In some embodiments, all purines of the antisense strand comprise 2′ fluoro modified purines, and all pyrimidines of the antisense strand comprise a mixture of 2′ fluoro and 2′-O-methyl modified pyrimidines. In some embodiments, all purines of the antisense strand comprise 2′-O-methyl modified purines, and all pyrimidines of the antisense strand comprise a mixture of 2′ fluoro and 2′-O-methyl modified pyrimidines. In some embodiments, all purines of the antisense strand comprise 2′ fluoro modified purines, and all pyrimidines of the antisense strand comprise 2′-O-methyl modified pyrimidines. In some embodiments, all purines of the antisense strand comprise 2′-O-methyl modified purines, and all pyrimidines of the antisense strand comprise 2′ fluoro modified pyrimidines. In some embodiments, all pyrimidines of the antisense strand comprise 2′ fluoro modified pyrimidines, and all purines of the antisense strand comprise a mixture of 2′ fluoro and 2′-O-methyl modified purines. In some embodiments, all pyrimidines of the antisense strand comprise 2′-O-methyl modified pyrimidines, and all purines of the antisense strand comprise a mixture of 2′ fluoro and 2′-O-methyl modified purines. In some embodiments, all pyrimidines of the antisense strand comprise 2′ fluoro modified pyrimidines, and all purines of the antisense strand comprise 2′-O-methyl modified purines. In some embodiments, all pyrimidines of the antisense strand comprise 2′-O-methyl modified pyrimidines, and all purines of the antisense strand comprise 2′ fluoro modified purines.

[0149] Disclosed herein, in some embodiments, are modified oligonucleotides. The modified oligonucleotide may be an siRNA that includes modifications to the ribose rings, and phosphate linkages. The modifications may be in particular patterns that maximize cell delivery, stability, and efficiency. The siRNA may also include a vinyl phosphonate and a hydrophobic group. These modifications may aid in delivery to a cell or tissue within a subject. The modified oligonucleotide may be used in a method such as a treatment method or a method of reducing gene expression.

[0150] In some embodiments, the oligonucleotide comprises a duplex consisting of 21 nucleotide single strands with base pairing between 19 of the base pairs. In some embodiments, the duplex comprises single-stranded 2 nucleotide overhangs are at the 3′ ends of each strand. One strand (antisense strand) is complementary to a MST1R mRNA. Each end of the antisense strand has one to two phosphorothioate bonds. The 5′ end has an optional phosphate mimic such as a vinyl phosphonate. In some embodiments, the oligonucleotide is used to knock down a MST1R mRNA or a target protein. In some embodiments, the sense strand has the same sequence as the MST1R mRNA. In some embodiments, there are 1-2 phosphorothioates at the 3′ end. In some embodiments, there are 1 or no phosphorothioates at the 5′ end. In some embodiments, there is a hydrophobic conjugate of 12 to 25 carbons attached at the 5′ end via a phosphodiester bond.

[0151] In some cases, the sense strand of any of the siRNAs comprises siRNA with a particular modification pattern. In some embodiments of the modification pattern, position 9 counting from the 5′ end of the sense strand may have a 2′F modification. In some embodiments, when position 9 of the sense strand is a pyrimidine, then all purines in the sense strand have a 2′OMe modification. In some embodiments, when position 9 is the only pyrimidine between positions 5 and 11 of the sense stand, then position 9 is the only position with a 2′F modification in the sense strand. In some embodiments, when position 9 and only one other base between positions 5 and 11 of the sense strand are pyrimidines, then both of these pyrimidines are the only two positions with a 2′F modification in the sense strand. In some embodiments, when position 9 and only two other bases between positions 5 and 11 of the sense strand are pyrimidines, and those two other pyrimidines are in adjacent positions so that there would be not three 2′F modifications in a row, then any combination of 2′F modifications can be made that give three 2′F modifications in total. In some embodiments, when there are more than 2 pyrimidines between positions 5 and 11 of the sense strand, then all combinations of pyrimidines having the 2′F modification are allowed that have three to five 2′F modifications in total, provided that the sense strand does not have three 2′F modifications in a row. In some cases, the sense strand of any of the siRNAs comprises a modification pattern which conforms to any or all of these sense strand rules.

[0152] In some embodiments, when position 9 of the sense strand is a purine, then all purines in the sense strand have a 2′OMe modification. In some embodiments, when position 9 is the only purine between positions 5 and 11 of the sense stand, then position 9 is the only position with a 2′F modification in the sense strand. In some embodiments, when position 9 and only one other base between positions 5 and 11 of the sense strand are purines, then both of these purines are the only two positions with a 2′F modification in the sense strand. In some embodiments, when position 9 and only two other bases between positions 5 and 11 of the sense strand are purines, and those two other purines are in adjacent positions so that there would be not three 2′F modifications in a row, then any combination of 2′F modifications can be made that give three 2′F modifications in total. In some embodiments, when there are more than 2 purines between positions 5 and 11 of the sense strand, then all combinations of purines having the 2′F modification are allowed that have three to five 2′F modifications in total, provided that the sense strand does not have three 2′F modifications in a row. In some cases, the sense strand of any of the siRNAs comprises a modification pattern which conforms to any or all of these sense strand rules.

[0153] In some cases, position 9 of the sense strand can be a 2′deoxy. In these cases, 2′F and 2′OMe modifications may occur at the other positions of the sense strand. In some cases, the sense strand of any of the siRNAs comprises a modification pattern which conforms to these sense strand rules.

[0154] In some cases, the sense strand of any of the siRNAs comprises a modification pattern which conforms to these sense strand rules.

[0155] In some embodiments, the siRNA comprises the sense strand and/or the antisense strand sequence of an siRNA in Table 9, or a nucleic acid sequence thereof having 3 or 4 nucleoside substitutions, additions, or deletions. In some embodiments, the siRNA comprises the sense strand and/or the antisense strand sequence of an siRNA in Table 9, or a nucleic acid sequence thereof having 1 or 2 nucleoside substitutions, additions, or deletions. In some embodiments, the siRNA comprises the sense strand and/or the antisense strand sequence of an siRNA in Table 9. The siRNA may include the same internucleoside linkage modifications or nucleoside modifications as those in Table 9. The siRNA may include any different internucleoside linkage modifications or nucleoside modifications different from those in Table 9. The siRNA may include some unmodified internucleoside linkages or nucleosides.

[0156] In some embodiments, the siRNA comprises the sense strand and/or the antisense strand sequence of an siRNA in Table 10, or a nucleic acid sequence thereof having 3 or 4 nucleoside substitutions, additions, or deletions. In some embodiments, the siRNA comprises the sense strand and/or the antisense strand sequence of an siRNA in Table 10, or a nucleic acid sequence thereof having 1 or 2 nucleoside substitutions, additions, or deletions. In some embodiments, the siRNA comprises the sense strand and/or the antisense strand sequence of an siRNA in Table 10. The siRNA may include the same internucleoside linkage modifications or nucleoside modifications as those in Table 10. The siRNA may include any different internucleoside linkage modifications or nucleoside modifications different from those in Table 10. The siRNA may include some unmodified internucleoside linkages or nucleosides.

### 4. ASO Modification Patterns

[0157] In some embodiments, the composition comprises an oligonucleotide that inhibits the expression of MST1R, wherein the oligonucleotide comprises an antisense oligonucleotide (ASO). In some embodiments, the ASO comprises modification pattern ASO1: 5′-nsnsnsnsnsdNsdNsdNsdNsdNsdNsdNsdNsdNsdNsnsnsnsnsn-3′ (SEQ ID NO: 9836), wherein “dN” is any deoxynucleotide, “n” is a 2′O-methyl or 2′O-methoxyethyl-modified nucleoside, and “s” is a phosphorothioate linkage. In some embodiments, the ASO comprises modification pattern 1S, 2S, 3S, 4S, 5S, 6S, 7S, 8S, 9S, 1AS, 2AS, 3AS, 4AS, 5AS, 6AS, 7AS, or 8AS.

### D. Formulations

[0158] In some embodiments, the composition is a pharmaceutical composition. In some embodiments, the composition is sterile. In some embodiments, the composition further comprises a pharmaceutically acceptable carrier.

[0159] In some embodiments, the pharmaceutically acceptable carrier comprises water. In some embodiments, the pharmaceutically acceptable carrier comprises a buffer. In some embodiments, the pharmaceutically acceptable carrier comprises a saline solution. In some embodiments, the pharmaceutically acceptable carrier comprises water, a buffer, or a saline solution. In some embodiments, the composition comprises a liposome. In some embodiments, the pharmaceutically acceptable carrier comprises liposomes, lipids, nanoparticles, proteins, protein-antibody complexes, peptides, cellulose, nanogel, or a combination thereof. In some embodiments, the oligonucleotide is combined with lipids, nanoparticles, polymers, liposomes, micelles, or another delivery system.

[0160] In some embodiments, the composition is formulated for delivery to a subject's lungs. In some embodiments, the composition is formulated for inhalation. In some embodiments, the composition is formulated for aerosolization. In some embodiments, the composition is formulated for administration by a nebulizer.

### II. METHODS AND USES

[0161] Disclosed herein, in some embodiments, are methods of administering a composition described herein to a subject. Some embodiments relate to use a composition described herein, such as administering the composition to a subject.

[0162] Some embodiments relate to a method of treating a disorder in a subject in need thereof. Some embodiments relate to use of a composition described herein in the method of treatment. Some embodiments include administering a composition described herein to a subject with the disorder. In some embodiments, the administration treats the disorder in the subject. In some embodiments, the composition treats the disorder in the subject.

[0163] In some embodiments, the treatment comprises prevention, inhibition, or reversion of the disorder in the subject. Some embodiments relate to use of a composition described herein in the method of preventing, inhibiting, or reversing the disorder. Some embodiments relate to a method of preventing, inhibiting, or reversing a disorder a disorder in a subject in need thereof. Some embodiments include administering a composition described herein to a subject with the disorder. In some embodiments, the administration prevents, inhibits, or reverses the disorder in the subject. In some embodiments, the composition prevents, inhibits, or reverses the disorder in the subject.

[0164] Some embodiments relate to a method of preventing a disorder a disorder in a subject in need thereof. Some embodiments relate to use of a composition described herein in the method of preventing the disorder. Some embodiments include administering a composition described herein to a subject with the disorder. In some embodiments, the administration prevents the disorder in the subject. In some embodiments, the composition prevents the disorder in the subject.

[0165] Some embodiments relate to a method of inhibiting a disorder a disorder in a subject in need thereof. Some embodiments relate to use of a composition described herein in the method of inhibiting the disorder. Some embodiments include administering a composition described herein to a subject with the disorder. In some embodiments, the administration inhibits the disorder in the subject. In some embodiments, the composition inhibits the disorder in the subject.

[0166] Some embodiments relate to a method of reversing a disorder a disorder in a subject in need thereof. Some embodiments relate to use of a composition described herein in the method of reversing the disorder. Some embodiments include administering a composition described herein to a subject with the disorder. In some embodiments, the administration reverses the disorder in the subject. In some embodiments, the composition reverses the disorder in the subject.

[0167] In some embodiments, the administration is systemic. In some embodiments, the administration is intravenous. In some embodiments, the administration is by injection. In some embodiments, the administration is to a subject's lungs. In some embodiments, the administration is by inhalation. In some embodiments, the administration is performed using a nebulizer.

### A. Disorders

[0168] Some embodiments of the methods described herein include treating a disorder in a subject in need thereof. In some embodiments, the disorder is a lung disorder. Non-limiting examples of lung disorders include chronic obstructive pulmonary disease (COPD), acute exacerbation of COPD, emphysema, chronic bronchitis, asthma, status asthmaticus, asthma-COPD overlap syndrome (ACOS), cough, lung cancer, interstitial lung disease, or pulmonary fibrosis. The lung disorder may include an obstructive airway disorder such as COPD or asthma. In some embodiments, the lung disorder includes COPD. In some embodiments, the lung disorder includes acute exacerbation of COPD. In some embodiments, the lung disorder includes emphysema. In some embodiments, the lung disorder includes chronic bronchitis. In some embodiments, the lung disorder includes asthma. In some embodiments, the lung disorder includes status asthmaticus. In some embodiments, the lung disorder includes ACOS. In some embodiments, the lung disorder includes cough. In some embodiments, the lung disorder includes lung cancer. In some embodiments, the lung disorder includes interstitial lung disease. In some embodiments, the lung disorder includes pulmonary fibrosis.

### B. Subjects

[0169] Some embodiments of the methods described herein include treatment of a subject. Non-limiting examples of subjects include vertebrates, animals, mammals, dogs, cats, cattle, rodents, mice, rats, primates, monkeys, and humans. In some embodiments, the subject is a vertebrate. In some embodiments, the subject is an animal. In some embodiments, the subject is a mammal. In some embodiments, the subject is a dog. In some embodiments, the subject is a cat. In some embodiments, the subject is a cattle. In some embodiments, the subject is a mouse. In some embodiments, the subject is a rat. In some embodiments, the subject is a primate. In some embodiments, the subject is a monkey. In some embodiments, the subject is an animal, a mammal, a dog, a cat, cattle, a rodent, a mouse, a rat, a primate, or a monkey. In some embodiments, the subject is a human. In some embodiments, the subject is male. In some embodiments, the subject is female. In some embodiments, the subject is an adult (e.g. at least 18 years old).

### C. Baseline Measurements

[0170] Some embodiments of the methods described herein include obtaining a baseline measurement from a subject. For example, in some embodiments, a baseline measurement is obtained from the subject prior to treating the subject. Non-limiting examples of baseline measurements include a baseline lung function measurement, a baseline leukocyte measurement, a baseline chronic obstructive pulmonary disease (COPD) exacerbation measurement, a baseline asthma exacerbation measurement, a baseline MST1R protein measurement, or a baseline MST1R mRNA measurement.

[0171] In some embodiments, the baseline measurement is obtained directly from the subject. In some embodiments, the baseline measurement is obtained by observation, for example by observation of the subject or of the subject's tissue. In some embodiments, the baseline measurement is obtained noninvasively using an imaging device.

[0172] In some embodiments, the baseline measurement is obtained in a sample from the subject. In some embodiments, the baseline measurement is obtained in one or more histological tissue sections. In some embodiments, the baseline measurement is obtained by performing an assay such as an immunoassay, a colorimetric assay, or a fluorescence assay, on the sample obtained from the subject. In some embodiments, the baseline measurement is obtained by an immunoassay, a colorimetric assay, a fluorescence assay, or a chromatography (e.g. HPLC) assay. In some embodiments, the baseline measurement is obtained by PCR.

[0173] In some embodiments, the baseline measurement is a baseline lung function measurement. In some embodiments, the baseline measurement is a baseline spirometry measurement. The baseline spirometry measurement may be obtained using a spirometer. The spirometer may generate a spirogram comprising a volume-time curve or a flow-volume loop. In some embodiments, the baseline spirometry measurement is obtained by having the subject breathe into a spirometer sensor. Examples of baseline spirometry measurements may include a baseline forced expiratory volume in 1 second (FEV1) measurement, a baseline forced expiratory volume in 1 second percent predicted (FEV1pp) measurement, a baseline forced vital capacity (FVC) measurement, a baseline FEV1/FVC ratio, a baseline forced expiratory volume, or a baseline peak expiratory flow measurement. In some embodiments, the baseline measurement includes a baseline forced expiratory volume in 1 second (FEV1) measurement. In some embodiments, the baseline measurement includes a baseline forced expiratory volume in 1 second percent predicted (FEV1pp) measurement. In some embodiments, the baseline measurement includes a baseline forced vital capacity (FVC) measurement. In some embodiments, the baseline measurement includes a baseline FEV1/FVC ratio. The baseline FEV1/FVC ratio may be below 70% or below 80%, in some cases. In some embodiments, the baseline measurement includes a baseline forced expiratory volume. In some embodiments, the baseline measurement includes a baseline peak expiratory flow measurement.

[0174] In some embodiments, the baseline measurement includes a baseline leukocyte measurement. In some embodiments, the baseline leukocyte measurement includes a baseline circulating leukocyte measurement. In some embodiments, the baseline leukocyte measurement includes a baseline lung tissue leukocyte measurement. In some embodiments, the baseline leukocyte measurement includes a baseline lung fluid (e.g. bronchoalveolar fluid) leukocyte measurement. In some embodiments, the baseline leukocyte measurement includes a baseline leukocyte count. In some embodiments, the baseline leukocyte measurement includes a baseline leukocyte concentration. In some embodiments, the baseline leukocyte measurement includes a baseline leukocyte percentage. The percentage may be in relation to other cells. Examples of leukocytes that may be included in the baseline leukocyte measurement include neutrophils, eosinophils, basophils, monocytes, or lymphocytes. The leukocytes may include neutrophils. The leukocytes may include eosinophils. The leukocytes may include basophils. The leukocytes may include monocytes. The leukocytes may include lymphocytes. In some embodiments, the baseline leukocyte measurement is obtained by an assay such as an immunoassay, a colorimetric assay, or a fluorescence assay. In some embodiments, the baseline leukocyte measurement is high, relative to a control leukocyte measurement. For example, a subject who has not been treated with a composition described herein and who has an inflammatory lung disorder may have a high leukocyte count in the subject's blood or lungs. In some embodiments, the baseline leukocyte measurement is determined in lung tissue or a lung fluid such as bronchoalveolar fluid, and may include a baseline measurement of neutrophils and macrophages.

[0175] In some embodiments, the baseline measurement includes a baseline chronic obstructive pulmonary disease (COPD) exacerbation measurement. A COPD exacerbation may include a COPD flare-up such as an acute increase in severity of a respiratory symptom such as difficulty breathing. The baseline COPD exacerbation measurement may include a baseline number of COPD flare-ups, and may be included in a given time frame such as flare-ups per day, week, month, or year. The baseline COPD exacerbation measurement may include a baseline frequency of COPD exacerbations. The baseline COPD exacerbation measurement may include a baseline measurement of worsening of a respiratory symptom, such as increased dyspnea, cough, sputum volume, or sputum purulence. The baseline COPD exacerbation measurement may include a baseline measurement of an event such as when a the subject's conditions change enough to require a change in treatment. The baseline COPD exacerbation measurement may include a baseline peak flow test, a baseline breath nitric oxide measurement, or a baseline blood oxygen level test.

[0176] In some embodiments, the baseline measurement includes a baseline asthma exacerbation measurement. An asthma exacerbation may include an asthma attack, for example narrowing of a bronchial tube that causes difficulty breathing. The baseline asthma exacerbation measurement may include a baseline number of number of asthma attacks, and may be included in a given time frame such as flare-ups per day, week, month, or year. The baseline asthma exacerbation measurement may include a baseline frequency of asthma exacerbations. The baseline asthma exacerbation measurement may include a baseline bronchial tube measurement such as a bronchial tube diameter, a bronchial tube circumference, or a bronchial tube area measurement. The baseline asthma exacerbation measurement may include a baseline amount of bronchial tube narrowing, such as a percent constriction. The baseline asthma exacerbation measurement may include a baseline wheezing measurement, a baseline coughing measurement, a baseline chest tightening measurement, a baseline shortness of breath measurement, a baseline agitation measurement, a baseline hyperventilation measurement, a baseline heart rate measurement, a baseline lung function measurement, or a baseline measurement of difficulty speaking or breathing. The baseline asthma exacerbation measurement may include a baseline peak flow test, a baseline breath nitric oxide measurement, or a baseline blood oxygen level test.

[0177] In some embodiments, the baseline measurement is a baseline MST1R protein measurement. In some embodiments, the baseline MST1R protein measurement comprises a baseline MST1R protein level. In some embodiments, the baseline MST1R protein level is indicated as a mass or percentage of MST1R protein per sample weight. In some embodiments, the baseline MST1R protein level is indicated as a mass or percentage of MST1R protein per sample volume. In some embodiments, the baseline MST1R protein level is indicated as a mass or percentage of MST1R protein per total protein within the sample. In some embodiments, the baseline MST1R protein measurement is a baseline lung MST1R protein measurement. In some embodiments, the baseline MST1R protein measurement is obtained by an assay such as an immunoassay, a colorimetric assay, or a fluorescence assay.

[0178] In some embodiments, the baseline measurement is a baseline MST1R mRNA measurement. In some embodiments, the baseline MST1R mRNA measurement comprises a baseline MST1R mRNA level. In some embodiments, the baseline MST1R mRNA level is indicated as an amount or percentage of MST1R mRNA per sample weight. In some embodiments, the baseline MST1R mRNA level is indicated as an amount or percentage of MST1R mRNA per sample volume. In some embodiments, the baseline MST1R mRNA level is indicated as an amount or percentage of MST1R mRNA per total mRNA within the sample. In some embodiments, the baseline MST1R mRNA level is indicated as an amount or percentage of MST1R mRNA per total nucleic acids within the sample. In some embodiments, the baseline MST1R mRNA level is indicated relative to another mRNA level, such as an mRNA level of a housekeeping gene, within the sample. In some embodiments, the baseline MST1R mRNA measurement is obtained by an assay such as a polymerase chain reaction (PCR) assay. In some embodiments, the PCR comprises quantitative PCR (qPCR). In some embodiments, the PCR comprises reverse transcription of the MST1R mRNA.

[0179] Some embodiments of the methods described herein include obtaining a sample from a subject. In some embodiments, the baseline measurement is obtained in a sample obtained from the subject. In some embodiments, the sample is obtained from the subject prior to administration or treatment of the subject with a composition described herein. In some embodiments, a baseline measurement is obtained in a sample obtained from the subject prior to administering the composition to the subject.

[0180] In some embodiments, the sample comprises a fluid. In some embodiments, the sample is a fluid sample. For example, a fluid sample may be used in obtaining a leukocyte measurement or baseline measurement. In some embodiments, the sample is a blood, plasma, or serum sample. In some embodiments, the baseline MST1R mRNA measurement is obtained in a fluid sample. In some embodiments, the sample comprises blood. In some embodiments, the sample is a blood sample. In some embodiments, the sample is a whole-blood sample. In some embodiments, the blood is fractionated or centrifuged. In some embodiments, the sample comprises plasma. In some embodiments, the sample is a plasma sample. A blood sample may be a plasma sample. In some embodiments, the sample comprises serum. In some embodiments, the sample is a serum sample. A blood sample may be a serum sample. In some embodiments, the fluid sample includes a lung fluid sample. In some embodiments, the lung fluid sample includes alveolar fluid. In some embodiments, the lung fluid sample includes bronchial fluid. In some embodiments, the lung fluid sample includes bronchoalveolar fluid. The lung fluid may be obtained via a lavage method such as a bronchoalveolar lavage method. The lavage method may include the use of a bronchoscope.

[0181] In some embodiments, the sample comprises a tissue. In some embodiments, the sample is a tissue sample. In some embodiments, the tissue comprises lung, or vascular tissue. For example, the baseline MST1R mRNA measurement, or the baseline MST1R protein measurement, may be obtained in a lung sample obtained from the patient. In some embodiments, the tissue comprises lung tissue. The lung may include lung epithelial cells, type I alveolar cells, type II alveolar cells, macrophages, alveolar macrophages, goblet cells, club cells, or fibroblasts. In some embodiments, the tissue comprises vascular tissue. The vascular tissue may include vascular endothelial cells. For example, the lung tissue may include vascular endothelial cells.

[0182] In some embodiments, the sample includes cells. In some embodiments, the sample comprises a cell. In some embodiments, the cell is a lung cell. In some embodiments, the lung cell is a lung epithelial cell. In some embodiments, the lung cell is a type I alveolar cell. In some embodiments, the lung cell is a type II alveolar cell. In some embodiments, the lung cell is a macrophage. In some embodiments, the lung cell is a alveolar macrophage. In some embodiments, the lung cell is a goblet cell. In some embodiments, the lung cell is a club cell. In some embodiments, the lung cell is a fibroblast. In some embodiments, the cell is a vasculature cell. In some embodiments, the vasculature cell is an endothelial cell.

### D. Effects

[0183] In some embodiments, the composition or administration of the composition affects a measurement such as a lung function measurement, a leukocyte measurement, a chronic obstructive pulmonary disease (COPD) exacerbation measurement, an asthma exacerbation measurement, a MST1R protein measurement (for example, lung MST1R protein levels), or a MST1R mRNA measurement, relative to the baseline measurement.

[0184] Some embodiments of the methods described herein include obtaining the measurement from a subject. For example, the measurement may be obtained from the subject after treating the subject. In some embodiments, the measurement is obtained in a second sample (such as a fluid or tissue sample described herein) obtained from the subject after the composition is administered to the subject. In some embodiments, the measurement is an indication that the disorder has been treated.

[0185] In some embodiments, the measurement is obtained directly from the subject. In some embodiments, the measurement is obtained noninvasively using an imaging device. In some embodiments, the measurement is obtained in a second sample from the subject. In some embodiments, the measurement is obtained in one or more histological tissue sections. In some embodiments, the measurement is obtained by performing an assay on the second sample obtained from the subject. In some embodiments, the measurement is obtained by an assay, such as an assay described herein. In some embodiments, the assay is an immunoassay, a colorimetric assay, a fluorescence assay, a chromatography (e.g. HPLC) assay, or a PCR assay. In some embodiments, the measurement is obtained by an assay such as an immunoassay, a colorimetric assay, a fluorescence assay, or a chromatography (e.g. HPLC) assay. In some embodiments, the measurement is obtained by PCR. In some embodiments, the measurement is obtained by histology. In some embodiments, the measurement is obtained by observation. In some embodiments, additional measurements are made, such as in a 3rd sample, a 4th sample, or a fifth sample.

[0186] In some embodiments, the measurement is obtained within 1 hour, within 2 hours, within 3 hours, within 4 hours, within 5 hours, within 6 hours, within 12 hours, within 18 hours, or within 24 hours after the administration of the composition. In some embodiments, the measurement is obtained within 1 day, within 2 days, within 3 days, within 4 days, within 5 days, within 6 days, or within 7 days after the administration of the composition. In some embodiments, the measurement is obtained within 1 week, within 2 weeks, within 3 weeks, within 1 month, within 2 months, within 3 months, within 6 months, within 1 year, within 2 years, within 3 years, within 4 years, or within 5 years after the administration of the composition. In some embodiments, the measurement is obtained after 1 hour, after 2 hours, after 3 hours, after 4 hours, after 5 hours, after 6 hours, after 12 hours, after 18 hours, or after 24 hours after the administration of the composition. In some embodiments, the measurement is obtained after 1 day, after 2 days, after 3 days, after 4 days, after 5 days, after 6 days, or after 7 days after the administration of the composition. In some embodiments, the measurement is obtained after 1 week, after 2 weeks, after 3 weeks, after 1 month, after 2 months, after 3 months, after 6 months, after 1 year, after 2 years, after 3 years, after 4 years, or after 5 years, following the administration of the composition.

[0187] In some embodiments, the composition reduces the measurement relative to the baseline measurement. For example, an adverse phenotype of a lung disorder may be reduced upon administration of the composition. In some embodiments, the reduction is measured in a second sample obtained from the subject after administering the composition to the subject. In some embodiments, the reduction is measured directly in the subject after administering the composition to the subject. In some embodiments, the measurement is decreased by about 2.5% or more, about 5% or more, or about 7.5% or more, relative to the baseline measurement. In some embodiments, the measurement is decreased by about 10% or more, relative to the baseline measurement. In some embodiments, the measurement is decreased by about 20% or more, about 30% or more, about 40% or more, about 50% or more, about 60% or more, about 70% or more, about 80% or more, about 90% or more, relative to the baseline measurement. In some embodiments, the measurement is decreased by no more than about 2.5%, no more than about 5%, or no more than about 7.5%, relative to the baseline measurement. In some embodiments, the measurement is decreased by no more than about 10%, relative to the baseline measurement. In some embodiments, the measurement is decreased by no more than about 20%, no more than about 30%, no more than about 40%, no more than about 50%, no more than about 60%, no more than about 70%, no more than about 80%, no more than about 90%, or no more than about 100% relative to the baseline measurement. In some embodiments, the measurement is decreased by 2.5%, 5%, 7.5%, 10%, 20%, 30%, 40%, 50%, 60%, 70%, 80%, 90%, or 100%, or by a range defined by any of the two aforementioned percentages.

[0188] In some embodiments, the composition increases the measurement relative to the baseline measurement. For example, a protective lung phenotype may be increased upon administration of the composition. In some embodiments, the increase is measured in a second sample obtained from the subject after administering the composition to the subject. In some embodiments, the increase is measured directly in the subject after administering the composition to the subject. In some embodiments, the measurement is increased by about 2.5% or more, about 5% or more, or about 7.5% or more, relative to the baseline measurement. In some embodiments, the measurement is increased by about 10% or more, relative to the baseline measurement. In some embodiments, the measurement is increased by about 20% or more, about 30% or more, about 40% or more, about 50% or more, about 60% or more, about 70% or more, about 80% or more, about 90% or more, relative to the baseline measurement. In some embodiments, the measurement is increased by about 100% or more, increased by about 250% or more, increased by about 500% or more, increased by about 750% or more, or increased by about 1000% or more, relative to the baseline measurement. In some embodiments, the measurement is increased by no more than about 2.5%, no more than about 5%, or no more than about 7.5%, relative to the baseline measurement. In some embodiments, the measurement is increased by no more than about 10%, relative to the baseline measurement. In some embodiments, the measurement is increased by no more than about 20%, no more than about 30%, no more than about 40%, no more than about 50%, no more than about 60%, no more than about 70%, no more than about 80%, no more than about 90%, or no more than about 100% relative to the baseline measurement. In some embodiments, the measurement is increased by no more than about 100%, increased by no more than about 250%, increased by no more than about 500%, increased by no more than about 750%, or increased by no more than about 1000%, relative to the baseline measurement. In some embodiments, the measurement is increased by 2.5%, 5%, 7.5%, 10%, 20%, 30%, 40%, 50%, 60%, 70%, 80%, 90%, 100%, 250%, 500%, 750%, or 1000%, or by a range defined by any of the two aforementioned percentages.

[0189] In some embodiments, the measurement is a lung function measurement. In some embodiments, the measurement is a spirometry measurement. The spirometry measurement may be obtained using a spirometer. The spirometer may generate a spirogram comprising a volume-time curve or a flow-volume loop. In some embodiments, the spirometry measurement is obtained by having the subject breathe into a spirometer sensor. Examples of spirometry measurements may include a forced expiratory volume in 1 second (FEV1) measurement, a forced expiratory volume in 1 second percent predicted (FEV1pp) measurement, a forced vital capacity (FVC) measurement, a FEV1/FVC ratio, a forced expiratory volume, or a peak expiratory flow measurement. In some embodiments, the measurement includes a forced expiratory volume in 1 second (FEV1) measurement. In some embodiments, the measurement includes a forced expiratory volume in 1 second percent predicted (FEV1pp) measurement. In some embodiments, the measurement includes a forced vital capacity (FVC) measurement. In some embodiments, the measurement includes a FEV1/FVC ratio. The FEV1/FVC ratio may be below 70% or below 80%, in some cases. In some embodiments, the measurement includes a forced expiratory volume. In some embodiments, the measurement includes a peak expiratory flow measurement.

[0190] In some embodiments, the composition increases the lung function measurement relative to the baseline lung function measurement. In some embodiments, the increase is measured directly in the subject after administering the composition to the subject. In some embodiments, the lung function measurement is increased by about 2.5% or more, about 5% or more, or about 7.5% or more, relative to the baseline lung function measurement. In some embodiments, the lung function measurement is increased by about 10% or more, relative to the baseline lung function measurement. In some embodiments, the lung function measurement is increased by about 20% or more, about 30% or more, about 40% or more, about 50% or more, about 60% or more, about 70% or more, about 80% or more, about 90% or more, relative to the baseline lung function measurement. In some embodiments, the lung function measurement is increased by about 100% or more, increased by about 250% or more, increased by about 500% or more, increased by about 750% or more, or increased by about 1000% or more, relative to the baseline lung function measurement. In some embodiments, the lung function measurement is increased by no more than about 2.5%, no more than about 5%, or no more than about 7.5%, relative to the baseline lung function measurement. In some embodiments, the lung function measurement is increased by no more than about 10%, relative to the baseline lung function measurement. In some embodiments, the lung function measurement is increased by no more than about 20%, no more than about 30%, no more than about 40%, no more than about 50%, no more than about 60%, no more than about 70%, no more than about 80%, no more than about 90%, or no more than about 100% relative to the baseline lung function measurement. In some embodiments, the lung function measurement is increased by no more than about 100%, increased by no more than about 250%, increased by no more than about 500%, increased by no more than about 750%, or increased by no more than about 1000%, relative to the baseline lung function measurement. In some embodiments, the lung function measurement is increased by 2.5%, 5%, 7.5%, 10%, 20%, 30%, 40%, 50%, 60%, 70%, 80%, 90%, 100%, 250%, 500%, 750%, or 1000%, or by a range defined by any of the two aforementioned percentages.

[0191] In some embodiments, the measurement includes a leukocyte measurement. In some embodiments, the leukocyte measurement includes a circulating leukocyte measurement. In some embodiments, the leukocyte measurement includes a lung tissue leukocyte measurement. In some embodiments, the leukocyte measurement includes a lung fluid (e.g. bronchoalveolar fluid) leukocyte measurement. In some embodiments, the leukocyte measurement includes a leukocyte count. In some embodiments, the leukocyte measurement includes a leukocyte concentration. In some embodiments, the leukocyte measurement includes a leukocyte percentage. The percentage may be in relation to other cells. Examples of leukocytes that may be included in the leukocyte measurement include neutrophils, eosinophils, basophils, monocytes, or lymphocytes. The leukocytes may include neutrophils. The leukocytes may include eosinophils. The leukocytes may include basophils. The leukocytes may include monocytes. The leukocytes may include lymphocytes. In some embodiments, the leukocyte measurement is obtained by an assay such as an immunoassay, a colorimetric assay, or a fluorescence assay. In some embodiments, the leukocyte measurement is normal, relative to a control leukocyte measurement. For example, a subject who has been treated with a composition described herein and who has an inflammatory lung disorder may have had a high leukocyte count that is now low or normal. In some embodiments, the leukocyte measurement is determined in lung tissue or a lung fluid such as bronchoalveolar fluid, and may include a measurement of neutrophils and macrophages.

[0192] In some embodiments, the composition reduces the leukocyte measurement relative to the baseline leukocyte measurement. In some embodiments, the reduction is measured in a second sample obtained from the subject after administering the composition to the subject. In some embodiments, the leukocyte measurement is decreased by about 2.5% or more, about 5% or more, or about 7.5% or more, relative to the baseline leukocyte measurement. In some embodiments, the leukocyte measurement is decreased by about 10% or more, relative to the baseline leukocyte measurement. In some embodiments, the leukocyte measurement is decreased by about 20% or more, about 30% or more, about 40% or more, about 50% or more, about 60% or more, about 70% or more, or about 80% or more, relative to the baseline leukocyte measurement. In some embodiments, the leukocyte measurement is decreased by no more than about 2.5%, no more than about 5%, or no more than about 7.5%, relative to the baseline leukocyte measurement. In some embodiments, the leukocyte measurement is decreased by no more than about 10%, relative to the baseline leukocyte measurement. In some embodiments, the leukocyte measurement is decreased by no more than about 20%, no more than about 30%, no more than about 40%, no more than about 50%, no more than about 60%, no more than about 70%, or no more than about 80%, relative to the baseline leukocyte measurement. In some embodiments, the leukocyte measurement is decreased by 2.5%, 5%, 7.5%, 10%, 20%, 30%, 40%, 50%, 60%, 70%, 80%, 90%, or 100%, or by a range defined by any of the two aforementioned percentages. In some embodiments, the leukocyte measurement is increased by any of the aforementioned percentages or ranges of percentages, relative to the baseline leukocyte measurement.

[0193] In some embodiments, the measurement includes a chronic obstructive pulmonary disease (COPD) exacerbation measurement. A COPD exacerbation may include a COPD flare-up such as an acute increase in severity of a respiratory symptom such as difficulty breathing. The COPD exacerbation measurement may include a number of COPD flare-ups, and may be included in a given time frame such as flare-ups per day, week, month, or year. The COPD exacerbation measurement may include a frequency of COPD exacerbations. The COPD exacerbation measurement may include a measurement of worsening of a respiratory symptom, such as increased dyspnea, cough, sputum volume, or sputum purulence. The COPD exacerbation measurement may include a measurement of an event such as when a the subject's conditions change enough to require a change in treatment. The COPD exacerbation measurement may include a peak flow test, a breath nitric oxide measurement, or a blood oxygen level test.

[0194] In some embodiments, the composition reduces the COPD exacerbation measurement relative to the baseline COPD exacerbation measurement. In some embodiments, the reduction is measured in a second sample obtained from the subject after administering the composition to the subject. In some embodiments, the reduction is measured directly in the subject after administering the composition to the subject. In some embodiments, the COPD exacerbation measurement is decreased by about 2.5% or more, about 5% or more, or about 7.5% or more, relative to the baseline COPD exacerbation measurement. In some embodiments, the COPD exacerbation measurement is decreased by about 10% or more, relative to the baseline COPD exacerbation measurement. In some embodiments, the COPD exacerbation measurement is decreased by about 20% or more, about 30% or more, about 40% or more, about 50% or more, about 60% or more, about 70% or more, about 80% or more, about 90% or more, relative to the baseline COPD exacerbation measurement. In some embodiments, the COPD exacerbation measurement is decreased by no more than about 2.5%, no more than about 5%, or no more than about 7.5%, relative to the baseline COPD exacerbation measurement. In some embodiments, the COPD exacerbation measurement is decreased by no more than about 10%, relative to the baseline COPD exacerbation measurement. In some embodiments, the COPD exacerbation measurement is decreased by no more than about 20%, no more than about 30%, no more than about 40%, no more than about 50%, no more than about 60%, no more than about 70%, no more than about 80%, no more than about 90%, or no more than about 100% relative to the baseline COPD exacerbation measurement. In some embodiments, the COPD exacerbation measurement is decreased by 2.5%, 5%, 7.5%, 10%, 20%, 30%, 40%, 50%, 60%, 70%, 80%, 90%, or 100%, or by a range defined by any of the two aforementioned percentages.

[0195] In some embodiments, the measurement includes an asthma exacerbation measurement. An asthma exacerbation may include an asthma attack, for example narrowing of a bronchial tube that causes difficulty breathing. The asthma exacerbation measurement may include a number of number of asthma attacks, and may be included in a given time frame such as flare-ups per day, week, month, or year. The asthma exacerbation measurement may include a frequency of asthma exacerbations. The asthma exacerbation measurement may include a bronchial tube measurement such as a bronchial tube diameter, a bronchial tube circumference, or a bronchial tube area measurement. The asthma exacerbation measurement may include an amount of bronchial tube narrowing, such as a percent constriction. The asthma exacerbation measurement may include a wheezing measurement, a coughing measurement, a chest tightening measurement, a shortness of breath measurement, a agitation measurement, a hyperventilation measurement, a heart rate measurement, a lung function measurement, or a measurement of difficulty speaking or breathing. The asthma exacerbation measurement may include a peak flow test, a breath nitric oxide measurement, or a blood oxygen level test.

[0196] In some embodiments, the composition reduces the asthma exacerbation measurement relative to the baseline asthma exacerbation measurement. In some embodiments, the reduction is measured in a second sample obtained from the subject after administering the composition to the subject. In some embodiments, the reduction is measured directly in the subject after administering the composition to the subject. In some embodiments, the asthma exacerbation measurement is decreased by about 2.5% or more, about 5% or more, or about 7.5% or more, relative to the baseline asthma exacerbation measurement. In some embodiments, the asthma exacerbation measurement is decreased by about 10% or more, relative to the baseline asthma exacerbation measurement. In some embodiments, the asthma exacerbation measurement is decreased by about 20% or more, about 30% or more, about 40% or more, about 50% or more, about 60% or more, about 70% or more, about 80% or more, about 90% or more, relative to the baseline asthma exacerbation measurement. In some embodiments, the asthma exacerbation measurement is decreased by no more than about 2.5%, no more than about 5%, or no more than about 7.5%, relative to the baseline asthma exacerbation measurement. In some embodiments, the asthma exacerbation measurement is decreased by no more than about 10%, relative to the baseline asthma exacerbation measurement. In some embodiments, the asthma exacerbation measurement is decreased by no more than about 20%, no more than about 30%, no more than about 40%, no more than about 50%, no more than about 60%, no more than about 70%, no more than about 80%, no more than about 90%, or no more than about 100% relative to the baseline asthma exacerbation measurement. In some embodiments, the asthma exacerbation measurement is decreased by 2.5%, 5%, 7.5%, 10%, 20%, 30%, 40%, 50%, 60%, 70%, 80%, 90%, or 100%, or by a range defined by any of the two aforementioned percentages.

[0197] In some embodiments, the measurement is an MST1R protein measurement. In some embodiments, the MST1R protein measurement comprises an MST1R protein level. In some embodiments, the MST1R protein level is indicated as a mass or percentage of MST1R protein per sample weight. In some embodiments, the MST1R protein level is indicated as a mass or percentage of MST1R protein per sample volume. In some embodiments, the MST1R protein level is indicated as a mass or percentage of MST1R protein per total protein within the sample. In some embodiments, the MST1R protein measurement is a lung MST1R protein measurement. In some embodiments, the MST1R protein measurement is obtained by an assay such as an immunoassay, a colorimetric assay, or a fluorescence assay.

[0198] In some embodiments, the composition reduces the MST1R protein measurement relative to the baseline MST1R protein measurement. In some embodiments, the composition reduces tissue MST1R protein levels relative to the baseline MST1R protein measurement. In some embodiments, the composition reduces lung MST1R protein levels relative to the baseline MST1R protein measurement. In some embodiments, the reduced MST1R protein levels are measured in a second sample obtained from the subject after administering the composition to the subject. In some embodiments, the second sample is a lung sample. In some embodiments, the MST1R protein measurement is decreased by about 2.5% or more, about 5% or more, or about 7.5% or more, relative to the baseline MST1R protein measurement. In some embodiments, the MST1R protein measurement is decreased by about 10% or more, relative to the baseline MST1R protein measurement. In some embodiments, the MST1R protein measurement is decreased by about 20% or more, about 30% or more, about 40% or more, about 50% or more, about 60% or more, about 70% or more, about 80% or more, about 90% or more, or about 100%, relative to the baseline MST1R protein measurement. In some embodiments, the MST1R protein measurement is decreased by no more than about 2.5%, no more than about 5%, or no more than about 7.5%, relative to the baseline MST1R protein measurement. In some embodiments, the MST1R protein measurement is decreased by no more than about 10%, relative to the baseline MST1R protein measurement. In some embodiments, the MST1R protein measurement is decreased by no more than about 20%, no more than about 30%, no more than about 40%, no more than about 50%, no more than about 60%, no more than about 70%, no more than about 80%, no more than about 90%, or no more than about 100% relative to the baseline MST1R protein measurement. In some embodiments, the MST1R protein measurement is decreased by 2.5%, 5%, 7.5%, 19%, 20%, 30%, 40%, 50%, 60%, 70%, 80%, 90%, or 100%, or by a range defined by any of the two aforementioned percentages.

[0199] In some embodiments, the measurement is an MST1R mRNA measurement. In some embodiments, the MST1R mRNA measurement comprises an MST1R mRNA level. In some embodiments, the MST1R mRNA level is indicated as an amount or percentage of MST1R mRNA per sample weight. In some embodiments, the MST1R mRNA level is indicated as an amount or percentage of MST1R mRNA per sample volume. In some embodiments, the MST1R mRNA level is indicated as an amount or percentage of MST1R mRNA per total mRNA within the sample. In some embodiments, the MST1R mRNA level is indicated as an amount or percentage of MST1R mRNA per total nucleic acids within the sample. In some embodiments, the MST1R mRNA level is indicated relative to another mRNA level, such as an mRNA level of a housekeeping gene, within the sample. In some embodiments, the MST1R mRNA measurement is obtained by an assay such as a PCR assay. In some embodiments, the PCR comprises qPCR. In some embodiments, the PCR comprises reverse transcription of the MST1R mRNA.

[0200] In some embodiments, the composition reduces the MST1R mRNA measurement relative to the baseline MST1R mRNA measurement. In some embodiments, the MST1R mRNA measurement is obtained in a second sample obtained from the subject after administering the composition to the subject. In some embodiments, the composition reduces MST1R mRNA levels relative to the baseline MST1R mRNA levels. In some embodiments, the reduced MST1R mRNA levels are measured in a second sample obtained from the subject after administering the composition to the subject. In some embodiments, the second sample is a lung sample. In some embodiments, the MST1R mRNA measurement is reduced by about 2.5% or more, about 5% or more, or about 7.5% or more, relative to the baseline MST1R mRNA measurement. In some embodiments, the MST1R mRNA measurement is decreased by about 10% or more, relative to the baseline MST1R mRNA measurement. In some embodiments, the MST1R mRNA measurement is decreased by about 20% or more, about 30% or more, about 40% or more, about 50% or more, about 60% or more, about 70% or more, about 80% or more, about 90% or more, or about 100%, relative to the baseline MST1R mRNA measurement. In some embodiments, the MST1R mRNA measurement is decreased by no more than about 2.5%, no more than about 5%, or no more than about 7.5%, relative to the baseline MST1R mRNA measurement. In some embodiments, the MST1R mRNA measurement is decreased by no more than about 10%, relative to the baseline MST1R mRNA measurement. In some embodiments, the MST1R mRNA measurement is decreased by no more than about 20%, no more than about 30%, no more than about 40%, no more than about 50%, no more than about 60%, no more than about 70%, no more than about 80%, no more than about 90%, or no more than about 100%, relative to the baseline MST1R mRNA measurement. In some embodiments, the MST1R mRNA measurement is decreased by 2.5%, 5%, 7.5%, 10%, 20%, 30%, 40%, 50%, 60%, 70%, 80%, 90%, or 100% or by a range defined by any of the two aforementioned percentages.

### III. DEFINITIONS

[0201] Unless defined otherwise, all terms of art, notations and other technical and scientific terms or terminology used herein are intended to have the same meaning as is commonly understood by one of ordinary skill in the art to which the claimed subject matter pertains. In some cases, terms with commonly understood meanings are defined herein for clarity and/or for ready reference, and the inclusion of such definitions herein should not necessarily be construed to represent a substantial difference over what is generally understood in the art.

[0202] Throughout this application, various embodiments may be presented in a range format. It should be understood that the description in range format is merely for convenience and brevity and should not be construed as an inflexible limitation on the scope of the disclosure. Accordingly, the description of a range should be considered to have specifically disclosed all the possible subranges as well as individual numerical values within that range. For example, description of a range such as from 1 to 6 should be considered to have specifically disclosed subranges such as from 1 to 3, from 1 to 4, from 1 to 5, from 2 to 4, from 2 to 6, from 3 to 6 etc., as well as individual numbers within that range, for example, 1, 2, 3, 4, 5, and 6. This applies regardless of the breadth of the range.

[0203] As used in the specification and claims, the singular forms “a”, “an” and “the” include plural references unless the context clearly dictates otherwise. For example, the term “a sample” includes a plurality of samples, including mixtures thereof.

[0204] The terms “determining,” “measuring,” “evaluating,” “assessing,” “assaying,” and “analyzing” are often used interchangeably herein to refer to forms of measurement. The terms include determining if an element is present or not (for example, detection). These terms can include quantitative, qualitative or quantitative and qualitative determinations. Assessing can be relative or absolute. “Detecting the presence of” can include determining the amount of something present in addition to determining whether it is present or absent depending on the context.

[0205] The terms “subject,” and “patient” may be used interchangeably herein. A “subject” can be a biological entity containing expressed genetic materials. The biological entity can be a plant, animal, or microorganism, including, for example, bacteria, viruses, fungi, and protozoa. The subject can be a mammal. The mammal can be a human. The subject may be diagnosed or suspected of being at high risk for a disease. In some cases, the subject is not necessarily diagnosed or suspected of being at high risk for the disease.

[0206] As used herein, the term “about” a number refers to that number plus or minus 10% of that number. The term “about” a range refers to that range minus 10% of its lowest value and plus 10% of its greatest value.

[0207] As used herein, the terms “treatment” or “treating” are used in reference to a pharmaceutical or other intervention regimen for obtaining beneficial or desired results in the recipient. Beneficial or desired results include but are not limited to a therapeutic benefit and/or a prophylactic benefit. A therapeutic benefit may refer to eradication or amelioration of symptoms or of an underlying disorder being treated. Also, a therapeutic benefit can be achieved with the eradication or amelioration of one or more of the physiological symptoms associated with the underlying disorder such that an improvement is observed in the subject, notwithstanding that the subject may still be afflicted with the underlying disorder. A prophylactic effect includes delaying, preventing, or eliminating the appearance of a disease or condition, delaying or eliminating the onset of symptoms of a disease or condition, slowing, halting, or reversing the progression of a disease or condition, or any combination thereof. For prophylactic benefit, a subject at risk of developing a particular disease, or to a subject reporting one or more of the physiological symptoms of a disease may undergo treatment, even though a diagnosis of this disease may not have been made.

[0208] The term “Cx-y” or “Cx-Cy” when used in conjunction with a chemical moiety, such as alkyl, alkenyl, or alkynyl is meant to include groups that contain from x to y carbons in the chain. For example, the term “C1-6alkyl” refers to substituted or unsubstituted saturated hydrocarbon groups, including straight-chain alkyl and branched-chain alkyl groups that contain from 1 to 6 carbons.

[0209] The terms “Cx-yalkenyl” and “Cx-yalkynyl” refer to substituted or unsubstituted unsaturated aliphatic groups analogous in length and possible substitution to the alkyls described above, but that contain at least one double or triple bond, respectively.

[0210] The term “carbocycle” as used herein refers to a saturated, unsaturated or aromatic ring in which each atom of the ring is carbon. Carbocycle includes 3- to 10-membered monocyclic rings, 5- to 12-membered bicyclic rings, 5- to 12-membered spiro bicycles, and 5- to 12-membered bridged rings. Each ring of a bicyclic carbocycle may be selected from saturated, unsaturated, and aromatic rings. In an exemplary embodiment, an aromatic ring, e.g., phenyl, may be fused to a saturated or unsaturated ring, e.g., cyclohexane, cyclopentane, or cyclohexene. A bicyclic carbocycle includes any combination of saturated, unsaturated and aromatic bicyclic rings, as valence permits. A bicyclic carbocycle further includes spiro bicyclic rings such as spiropentane. A bicyclic carbocycle includes any combination of ring sizes such as 3-3 spiro ring systems, 4-4 spiro ring systems, 4-5 fused ring systems, 5-5 fused ring systems, 5-6 fused ring systems, 6-6 fused ring systems, 5-7 fused ring systems, 6-7 fused ring systems, 5-8 fused ring systems, and 6-8 fused ring systems. Exemplary carbocycles include cyclopentyl, cyclohexyl, cyclohexenyl, adamantyl, phenyl, indanyl, naphthyl, and bicyclo[1.1.1]pentanyl.

[0211] The term “aryl” refers to an aromatic monocyclic or aromatic multicyclic hydrocarbon ring system. The aromatic monocyclic or aromatic multicyclic hydrocarbon ring system contains only hydrogen and carbon and from five to eighteen carbon atoms, where at least one of the rings in the ring system is aromatic, i.e., it contains a cyclic, delocalized (4n+2) π-electron system in accordance with the Hückel theory. The ring system from which aryl groups are derived include, but are not limited to, groups such as benzene, fluorene, indane, indene, tetralin and naphthalene.

[0212] The term “cycloalkyl” refers to a saturated ring in which each atom of the ring is carbon. Cycloalkyl may include monocyclic and polycyclic rings such as 3- to 10-membered monocyclic rings, 5- to 12-membered bicyclic rings, 5- to 12-membered spiro bicycles, and 5- to 12-membered bridged rings. In certain embodiments, a cycloalkyl comprises three to ten carbon atoms. In other embodiments, a cycloalkyl comprises five to seven carbon atoms. The cycloalkyl may be attached to the rest of the molecule by a single bond. Examples of monocyclic cycloalkyls include, e.g., cyclopropyl, cyclobutyl, cyclopentyl, cyclohexyl, cycloheptyl, and cyclooctyl. Polycyclic cycloalkyl radicals include, for example, adamantyl, spiropentane, norbornyl (i.e., bicyclo[2.2.1]heptanyl), decalinyl, 7,7 dimethyl bicyclo[2.2.1]heptanyl, bicyclo[1.1.1]pentanyl, and the like.

[0213] The term “cycloalkenyl” refers to a saturated ring in which each atom of the ring is carbon and there is at least one double bond between two ring carbons. Cycloalkenyl may include monocyclic and polycyclic rings such as 3- to 10-membered monocyclic rings, 6- to 12-membered bicyclic rings, and 5- to 12-membered bridged rings. In other embodiments, a cycloalkenyl comprises five to seven carbon atoms. The cycloalkenyl may be attached to the rest of the molecule by a single bond. Examples of monocyclic cycloalkenyls include, e.g., cyclopentenyl, cyclohexenyl, cycloheptenyl, and cyclooctenyl.

[0214] The term “halo” or, alternatively, “halogen” or “halide,” means fluoro, chloro, bromo or iodo. In some embodiments, halo is fluoro, chloro, or bromo.

[0215] The term “haloalkyl” refers to an alkyl radical, as defined above, that is substituted by one or more halo radicals, for example, trifluoromethyl, dichloromethyl, bromomethyl, 2,2,2 trifluoroethyl, 1 chloromethyl 2 fluoroethyl, and the like. In some embodiments, the alkyl part of the haloalkyl radical is optionally further substituted as described herein.

[0216] The term “heterocycle” as used herein refers to a saturated, unsaturated or aromatic ring comprising one or more heteroatoms. Exemplary heteroatoms include N, O, Si, P, B, and S atoms. Heterocycles include 3- to 10-membered monocyclic rings, 6- to 12-membered bicyclic rings, 5- to 12-membered spiro bicycles, and 5- to 12-membered bridged rings. A bicyclic heterocycle includes any combination of saturated, unsaturated and aromatic bicyclic rings, as valence permits. In an exemplary embodiment, an aromatic ring, e.g., pyridyl, may be fused to a saturated or unsaturated ring, e.g., cyclohexane, cyclopentane, morpholine, piperidine or cyclohexene. A bicyclic heterocycle includes any combination of ring sizes such as 4-5 fused ring systems, 5-5 fused ring systems, 5-6 fused ring systems, 6-6 fused ring systems, 5-7 fused ring systems, 6-7 fused ring systems, 5-8 fused ring systems, and 6-8 fused ring systems. A bicyclic heterocycle further includes spiro bicyclic rings, e.g., 5 to 12-membered spiro bicycles, such as 2-oxa-6-azaspiro[3.3]heptane.

[0217] The term “heteroaryl” refers to a radical derived from a 5 to 18 membered aromatic ring radical that comprises two to seventeen carbon atoms and from one to six heteroatoms selected from nitrogen, oxygen and sulfur. As used herein, the heteroaryl radical is a monocyclic, bicyclic, tricyclic or tetracyclic ring system, wherein at least one of the rings in the ring system is aromatic, i.e., it contains a cyclic, delocalized (4n+2) π-electron system in accordance with the Hückel theory. Heteroaryl includes fused or bridged ring systems. The heteroatom(s) in the heteroaryl radical is optionally oxidized. One or more nitrogen atoms, if present, are optionally quaternized. The heteroaryl is attached to the rest of the molecule through any atom of the ring(s). Examples of heteroaryls include, but are not limited to, azepinyl, acridinyl, benzimidazolyl, benzindolyl, 1,3 benzodioxolyl, benzofuranyl, benzoxazolyl, benzo[d]thiazolyl, benzothiadiazolyl, benzo[b][1,4]dioxepinyl, benzo[b][1,4]oxazinyl, 1,4 benzodioxanyl, benzonaphthofuranyl, benzoxazolyl, benzodioxolyl, benzodioxinyl, benzopyranyl, benzopyranonyl, benzofuranyl, benzofuranonyl, benzothienyl (benzothiophenyl), benzothieno[3,2 d]pyrimidinyl, benzotriazolyl, benzo[4,6]imidazo[1,2 a]pyridinyl, carbazolyl, cinnolinyl, cyclopenta[d]pyrimidinyl, 6,7 dihydro 5H cyclopenta[4,5]thieno[2,3 d]pyrimidinyl, 5,6 dihydrobenzo[h]quinazolinyl, 5,6 dihydrobenzo[h]cinnolinyl, 6,7-dihydro-5H-benzo[6,7]cyclohepta[1,2-c]pyridazinyl, dibenzofuranyl, dibenzothiophenyl, furanyl, furanonyl, furo[3,2 c]pyridinyl, 5,6,7,8,9,10 hexahydrocycloocta[d]pyrimidinyl, 5,6,7,8,9,10 hexahydrocycloocta[d]pyridazinyl, 5,6,7,8,9,10 hexahydrocycloocta[d]pyridinyl, isothiazolyl, imidazolyl, indazolyl, indolyl, indazolyl, isoindolyl, indolinyl, isoindolinyl, isoquinolyl, indolizinyl, isoxazolyl, 5,8 methano 5,6,7,8 tetrahydroquinazolinyl, naphthyridinyl, 1,6 naphthyridinonyl, oxadiazolyl, 2 oxoazepinyl, oxazolyl, oxiranyl, 5,6,6a,7,8,9,10,10a octahydrobenzo[h]quinazolinyl, 1 phenyl 1H pyrrolyl, phenazinyl, phenothiazinyl, phenoxazinyl, phthalazinyl, pteridinyl, purinyl, pyrrolyl, pyrazolyl, pyrazolo[3,4 d]pyrimidinyl, pyridinyl, pyrido[3,2 d]pyrimidinyl, pyrido[3,4 d]pyrimidinyl, pyrazinyl, pyrimidinyl, pyridazinyl, pyrrolyl, quinazolinyl, quinoxalinyl, quinolinyl, isoquinolinyl, tetrahydroquinolinyl, 5,6,7,8 tetrahydroquinazolinyl, 5,6,7,8 tetrahydrobenzo[4,5]thieno[2,3 d]pyrimidinyl, 6,7,8,9 tetrahydro 5H cyclohepta[4,5]thieno[2,3 d]pyrimidinyl, 5,6,7,8 tetrahydropyrido[4,5 c]pyridazinyl, thiazolyl, thiadiazolyl, triazolyl, tetrazolyl, triazinyl, thieno[2,3 d]pyrimidinyl, thieno[3,2 d]pyrimidinyl, thieno[2,3 c]pyridinyl, and thiophenyl (i.e. thienyl).

[0218] The term “heterocycloalkyl” refers to a saturated ring with carbon atoms and at least one heteroatom. Exemplary heteroatoms include N, O, Si, P, B, and S atoms. Heterocycloalkyl may include monocyclic and polycyclic rings such as 3- to 10-membered monocyclic rings, 6- to 12-membered bicyclic rings, 5- to 12-membered spiro bicycles, and 5- to 12-membered bridged rings. The heteroatoms in the heterocycloalkyl radical are optionally oxidized. One or more nitrogen atoms, if present, are optionally quaternized. The heterocycloalkyl is attached to the rest of the molecule through any atom of the heterocycloalkyl, valence permitting, such as any carbon or nitrogen atoms of the heterocycloalkyl. Examples of heterocycloalkyl radicals include, but are not limited to, dioxolanyl, thienyl[1,3]dithianyl, decahydroisoquinolyl, imidazolinyl, imidazolidinyl, isothiazolidinyl, isoxazolidinyl, morpholinyl, octahydroindolyl, octahydroisoindolyl, 2 oxopiperazinyl, 2 oxopiperidinyl, 2 oxopyrrolidinyl, oxazolidinyl, piperidinyl, piperazinyl, 4 piperidonyl, pyrrolidinyl, pyrazolidinyl, quinuclidinyl, thiazolidinyl, tetrahydrofuryl, trithianyl, tetrahydropyranyl, thiomorpholinyl, thiamorpholinyl, 1 oxo thiomorpholinyl, 2-oxa-6-azaspiro[3.3]heptane, and 1,1 dioxo thiomorpholinyl.

[0219] The term “heterocycloalkenyl” refers to an unsaturated ring with carbon atoms and at least one heteroatom and there is at least one double bond between two ring carbons. Heterocycloalkenyl does not include heteroaryl rings. Exemplary heteroatoms include N, O, Si, P, B, and S atoms. Heterocycloalkenyl may include monocyclic and polycyclic rings such as 3- to 10-membered monocyclic rings, 6- to 12-membered bicyclic rings, and 5- to 12-membered bridged rings. In other embodiments, a heterocycloalkenyl comprises five to seven ring atoms. The heterocycloalkenyl may be attached to the rest of the molecule by a single bond. Examples of monocyclic cycloalkenyls include, e.g., pyrroline (dihydropyrrole), pyrazoline (dihydropyrazole), imidazoline (dihydroimidazole), triazoline (dihydrotriazole), dihydrofuran, dihydrothiophene, oxazoline (dihydrooxazole), isoxazoline (dihydroisoxazole), thiazoline (dihydrothiazole), isothiazoline (dihydroisothiazole), oxadiazoline (dihydrooxadiazole), thiadiazoline (dihydrothiadiazole), dihydropyridine, tetrahydropyridine, dihydropyridazine, tetrahydropyridazine, dihydropyrimidine, tetrahydropyrimidine, dihydropyrazine, tetrahydropyrazine, pyran, dihydropyran, thiopyran, dihydrothiopyran, dioxine, dihydrodioxine, oxazine, dihydrooxazine, thiazine, and dihydrothiazine.

[0220] The term “substituted” refers to moieties having substituents replacing a hydrogen on one or more carbons or substitutable heteroatoms, e.g., an NH or NH2 of a compound. It will be understood that “substitution” or “substituted with” includes the implicit proviso that such substitution is in accordance with permitted valence of the substituted atom and the substituent, and that the substitution results in a stable compound, i.e., a compound which does not spontaneously undergo transformation such as by rearrangement, cyclization, elimination, etc. In certain embodiments, substituted refers to moieties having substituents replacing two hydrogen atoms on the same carbon atom, such as substituting the two hydrogen atoms on a single carbon with an oxo, imino or thioxo group. As used herein, the term “substituted” is contemplated to include all permissible substituents of organic compounds. In a broad aspect, the permissible substituents include acyclic and cyclic, branched and unbranched, carbocyclic and heterocyclic, aromatic and non-aromatic substituents of organic compounds. The permissible substituents can be one or more and the same or different for appropriate organic compounds.

[0221] In some embodiments, substituents may include any substituents described herein, for example: halogen, hydroxy, oxo (═O), thioxo (=S), cyano (—CN), nitro (—NO2), imino (=N—H), oximo (=N—OH), hydrazino (=N—NH2), —Rb ORa, —Rb OC(O) Ra, —Rb OC(O) ORa, —Rb OC(O) N(Ra)2, —Rb N(Ra)2, —Rb C(O)Ra, —Rb C(O)ORa, —Rb C(O)N(Ra)2, —Rb O Rc C(O)N(Ra)2, —Rb N(Ra)C(O)ORa, —Rb N(Ra)C(O)Ra, —Rb N(Ra)S(O)tRa (where t is 1 or 2), —Rb S(O)tRa (where t is 1 or 2), —Rb S(O)tORa (where t is 1 or 2), and —Rb S(O)tN(Ra)2 (where t is 1 or 2); and alkyl, alkenyl, alkynyl, aryl, aralkyl, aralkenyl, aralkynyl, cycloalkyl, cycloalkylalkyl, heterocycloalkyl, heterocycloalkylalkyl, heteroaryl, and heteroarylalkyl, any of which may be optionally substituted by alkyl, alkenyl, alkynyl, halogen, haloalkyl, haloalkenyl, haloalkynyl, oxo (═O), thioxo (=S), cyano (—CN), nitro (—NO2), imino (=N—H), oximo (=N—OH), hydrazine (=N—NH2), —Rb ORa, —Rb OC(O) Ra, —Rb OC(O) ORa, —Rb OC(O) N(Ra)2, —Rb N(Ra)2, —Rb C(O)Ra, —Rb C(O)ORa, —Rb C(O)N(Ra)2, —Rb O Rc C(O)N(Ra)2, —Rb N(Ra)C(O)ORa, —Rb N(Ra)C(O)Ra, —Rb N(Ra)S(O)tRa (where t is 1 or 2), —Rb S(O)tRa (where t is 1 or 2), —Rb S(O)tORa (where t is 1 or 2) and —Rb S(O)tN(Ra)₂ (where t is 1 or 2); wherein each Ra is independently selected from hydrogen, alkyl, cycloalkyl, cycloalkylalkyl, aryl, aralkyl, heterocycloalkyl, heterocycloalkylalkyl, heteroaryl, or heteroarylalkyl, wherein each Ra, valence permitting, may be optionally substituted with alkyl, alkenyl, alkynyl, halogen, haloalkyl, haloalkenyl, haloalkynyl, oxo (═O), thioxo (=S), cyano (—CN), nitro (—NO2), imino (=N—H), oximo (=N—OH), hydrazine (=N—NH2), —Rb ORa, —Rb OC(O) Ra, —Rb OC(O) ORa, —Rb OC(O) N(Ra)2, —Rb N(Ra)2, —Rb C(O)Ra, —Rb C(O)ORa, —Rb C(O)N(Ra)2, —Rb O Rc C(O)N(Ra)2, —Rb N(Ra)C(O)ORa, —Rb N(Ra)C(O)Ra, —Rb N(Ra)S(O)tRa (where t is 1 or 2), —Rb S(O)tRa (where t is 1 or 2), —Rb S(O)tORa (where t is 1 or 2) and —Rb S(O)tN(Ra)2 (where t is 1 or 2); and wherein each Rb is independently selected from a direct bond or a straight or branched alkylene, alkenylene, or alkynylene chain, and each Rc is a straight or branched alkylene, alkenylene or alkynylene chain.

[0222] Double bonds to oxygen atoms, such as oxo groups, are represented herein as both “=O” and “(O)”. Double bonds to nitrogen atoms are represented as both “=NR” and “(NR)”. Double bonds to sulfur atoms are represented as both “=S” and “(S)”.

[0223] In some embodiments, a “derivative” polypeptide or peptide is one that is modified, for example, by glycosylation, pegylation, phosphorylation, sulfation, reduction/alkylation, acylation, chemical coupling, or mild formalin treatment. A derivative may also be modified to contain a detectable label, either directly or indirectly, including, but not limited to, a radioisotope, fluorescent, and enzyme label.

[0224] Some embodiments refer to nucleic acid sequence information. It is contemplated that in some embodiments, thymine (T) may be interchanged with uracil (U), or vice versa. For example, some sequences in the sequence listing may recite Ts, but these may be replaced with Us in some embodiments. In some oligonucleotides with nucleic acid sequences that include uracil, the uracil may be replaced with thymine. Similarly, in some oligonucleotides with nucleic acid sequences that include thymine, the thymine may be replaced with uracil. In some embodiments, an oligonucleotide such as an siRNA comprises or consists of RNA. In some embodiments, the oligonucleotide may comprise or consist of DNA. For example, an ASO may include DNA.

[0225] The section headings used herein are for organizational purposes only and are not to be construed as limiting the subject matter described.

### VI. EXAMPLES

### Example 1: Variants in Genes Encoding the Receptor MST1R and its Ligand MST1 Demonstrate Protective Associations for Obstructive Lung Diseases and Related Traits

[0226] Variants in MST1R and MST1 were evaluated for associations with lung diseases and related pulmonary and leukocyte traits in approximately 382,000 individuals with genotype data from the UK Biobank cohort. Variants evaluated included: (1) rs3020779, a common (AAF=0.82) MST1 synonymous variant (Pro153Pro; P153P) which is a MST1R lung↓eQTL (2) rs142690032, a low-frequency (AAF=0.02) MST1 stop-gained variant (Arg651Ter; R651Ter) which prematurely terminates MSP at amino acid 651, and (3) rs3197999, a common (AAF=0.29) MST1 missense variant (Arg703Cys; R703C) which has been experimentally characterized as impairing MSP's ability to bind MST1R. The rs3020779 variant was considered a hypomorphic MST1R variant that may result in a decrease in the abundance and/or activity of the MST1R gene product. The rs142690032 and rs3197999 variants were also considered to result in a decrease in abundance or activity of the MST1 gene product, and thus result in a decrease in signaling through the MST1R gene product.

[0227] Analyses used a logistic or linear regression model with age, sex and the first ten principal components of genetic ancestry as covariates. The analyses resulted in identification of associations for the individual MST1R and MST1 variants (Table 1A, 1B, 2A, and 2B). For example, there were protective associations with multiple lung-disease-related traits. The evaluated variants were associated with protection from COPD, asthma and lower risk of inhaled beta agonist prescription (Table 1A and 1B). Additionally, the evaluated variants were associated with increased lung function (FEV1 and FVC) and decreased circulating neutrophil counts (Table 2A and Table 2B).

TABLE 1A
MST1R and MST1 lung disease associations

| | | | | COPD (n = 22,308) | |
|---|---|---|---|---|---|
| Variant | Gene | Function | AAF | P value | OR |
| rs3020779 | MST1R | MST1R eQTL | 0.82 | 4.33E−09 | ↓0.941 |
| rs142690032 | MST1 | Stop-Gained; | 0.02 | 4.07E−07 | ↓0.859 |
| | | R651Ter | | | |
| rs3197999 | MST1 | Missense; | 0.29 | 2.16E−05 | ↓0.962 |
| | | R703C; MST1 | | | |
| | | pQTL | | | |

TABLE 1B
MST1R and MST1 lung disease associations

| | | | Family History | | Inhaled Beta | |
|---|---|---|---|---|---|---|
| | Asthma | | of COPD | | Agonist Medication | |
| | (n = 58,257) | | (n = 60,301) | | (n = 31,028) | |
| Variant | P value | OR | P value | OR | P value | OR |
| rs3020779 | 4.57E−04 | ↓0.979 | 0.004 | ↓0.985 | 5.32E−05 | ↓0.969 |
| rs142690032 | 0.004 | ↓0.955 | 0.105 | ↓0.980 | 4.47E−04 | ↓0.931 |
| rs3197999 | 0.002 | ↓0.983 | 0.001 | ↓0.984 | 2.56E−06 | ↓0.968 |

TABLE 2A
MST1R and MST1 lung function and neutrophil associations

| | | | | FEV1 (n = 287,050) | |
|---|---|---|---|---|---|
| Variant | Gene | Function | AAF | P value | Beta |
| rs3020779 | MST1R | MST1R eQTL | 0.82 | 3.06E−10 | ↑0.002 |
| rs142690032 | MST1 | Stop-Gained; | 0.02 | 0.003 | ↑0.015 |
| | | R651Ter | | | |
| rs3197999 | MST1 | Missense; | 0.29 | 3.29E−15 | ↑0.002 |
| | | R703C; MST1 | | | |
| | | pQTL | | | |

TABLE 2B
MST1R and MST1 lung function and neutrophil associations

| | FVC | | FEV1/FVC Ratio | | Neutrophil Count | |
|---|---|---|---|---|---|---|
| | (n = 286,925) | | (n = 286,523) | | (n = 366,089) | |
| Variant | P value | Beta | P value | Beta | P value | Beta |
| rs3020779 | 2.41E−06 | ↑0.001 | 9.32E−09 | ↑0.019 | 0.01 | ↓−0.010 |
| rs142690032 | 0.002 | ↑0.003 | 0.789 | ↑−0.003 | 0.005 | ↓−0.034 |
| rs3197999 | 1.03E−11 | ↑0.002 | 0.004 | ↑0.008 | 8.2E−08 | ↓−0.018 |

[0228] These results indicate that reduced abundance or activity of MST1R, and decreased MST1R signaling via reduced MSP abundance or activity, may protect against COPD or asthma, improve lung function, or lower circulating neutrophils, which may be pro-inflammatory cells involved in obstructive airway disease. These results further indicate that therapeutic inhibition of MST1R may result in similar disease-protective effects.

### Example 2: Bioinformatic Selection of Sequences in Order to Identify Therapeutic siRNAs to Downmodulate Expression of the MST1R mRNA

[0229] Screening sets were defined based on bioinformatic analysis. Therapeutic siRNAs were designed to target human MST1R, and the MST1R sequence of at least one toxicology-relevant species, in this case, the non-human primates (NHP) rhesus and cynomolgus monkeys. Drivers for the design of the screening set were predicted specificity of the siRNAs against the transcriptome of the relevant species as well as cross-reactivity between species. Predicted specificity in human, rhesus monkey, cynomolgus monkey, mouse and rat was determined for sense (S) and antisense (AS) strands. These were assigned a “specificity score” which considers the likelihood of unintended downregulation of any other transcript by full or partial complementarity of an siRNA strand (up to 4 mismatches within positions 2-18) as well as the number and positions of mismatches. Thus, off-target(s) for antisense and sense strands of each siRNA were identified. In addition, the number of potential off-targets was used as an additional specificity factor in the specificity score. As identified, siRNAs with high specificity and a low number of predicted off-targets provide a benefit of increased targeting specificity.

[0230] In addition to selecting siRNA sequences with high sequence specificity to MST1R mRNA, siRNA sequences within the seed region were analyzed for similarity to seed regions of known miRNAs. siRNAs can function in a miRNA like manner via base-pairing with complementary sequences within the 3′-UTR of mRNA molecules. The complementarity typically encompasses the 5′-bases at positions 2-7 of the miRNA (seed region). To circumvent siRNAs to act via functional miRNA binding sites, siRNA strands containing natural miRNA seed regions were avoided. Seed regions identified in miRNAs from human, mouse, rat, rhesus monkey, dog, rabbit and pig are referred to as “conserved”. Combining the “specificity score” with miRNA seed analysis yielded a “specificity category”. This is divided into categories 1-4, with 1 having the highest specificity and 4 having the lowest specificity. Each strand of the siRNA is assigned to a specificity category.

[0231] Specificity and species cross-reactivity was assessed for human, cynomolgus monkey, rhesus monkey, mouse and rat MST1R. The analysis was based on a canonical siRNA design using 19 bases and 17 bases (without considering positions 1 and 19) for cross-reactivity. Full match as well as single mismatch analyses were included.

[0232] Analysis of the human Single Nucleotide Polymorphism (SNP) database (NCBI-DB-SNP) to identify siRNAs targeting regions with known SNPs was also carried out to identify siRNAs that may be non-functional in individuals containing the SNP. Information regarding the positions of SNPs within the target sequence as well as minor allele frequency (MAF) in case data was obtained in this analysis.

[0233] Initial analysis of the relevant MST1R mRNA sequence revealed few sequences that fulfil the specificity parameters and at the same time target MST1R mRNA in all of the analyzed relevant species. Therefore, it was decided to design independent screening subsets for the therapeutic siRNAs.

[0234] The siRNAs in these subsets recognize the human, cynomolgus monkey, rhesus monkey MST1R sequences. Therefore, the siRNAs in these subsets can be used to target human MST1R in a therapeutic setting.

[0235] The number of siRNA sequences that can be derived from human MST1R mRNA (ENST00000296474.8, SEQ ID NO: 9818) without consideration of specificity or species cross-reactivity was 4754 (sense and antisense strand sequences included in SEQ ID NOS: 1-9508).

[0236] Prioritizing sequences for target specificity, species cross-reactivity, miRNA seed region sequences and SNPs as described above yields subset A. Subset A contains 336 siRNAs whose base sequences are shown in Table 3.

TABLE 3
Sequences in siRNA subset A

| SEQ ID | sense strand sequence | SEQ ID | antisense strand sequence |
|---|---|---|---|
| NO: | (5′-3′) | NO: | (5′-3′) |
| 469 | GCUGUGUUUGUAGCCAUAC | 5223 | GUAUGGCUACAAACACAGC |
| 471 | UGUGUUUGUAGCCAUACGC | 5225 | GCGUAUGGCUACAAACACA |
| 472 | GUGUUUGUAGCCAUACGCA | 5226 | UGCGUAUGGCUACAAACAC |
| 473 | UGUUUGUAGCCAUACGCAA | 5227 | UUGCGUAUGGCUACAAACA |
| 474 | GUUUGUAGCCAUACGCAAU | 5228 | AUUGCGUAUGGCUACAAAC |
| 475 | UUUGUAGCCAUACGCAAUC | 5229 | GAUUGCGUAUGGCUACAAA |
| 476 | UUGUAGCCAUACGCAAUCG | 5230 | CGAUUGCGUAUGGCUACAA |
| 477 | UGUAGCCAUACGCAAUCGC | 5231 | GCGAUUGCGUAUGGCUACA |
| 478 | GUAGCCAUACGCAAUCGCC | 5232 | GGCGAUUGCGUAUGGCUAC |
| 479 | UAGCCAUACGCAAUCGCCU | 5233 | AGGCGAUUGCGUAUGGCUA |
| 480 | AGCCAUACGCAAUCGCCUG | 5234 | CAGGCGAUUGCGUAUGGCU |
| 481 | GCCAUACGCAAUCGCCUGC | 5235 | GCAGGCGAUUGCGUAUGGC |
| 482 | CCAUACGCAAUCGCCUGCA | 5236 | UGCAGGCGAUUGCGUAUGG |
| 483 | CAUACGCAAUCGCCUGCAU | 5237 | AUGCAGGCGAUUGCGUAUG |
| 557 | ACCCUGGCUGCCAGACGUG | 5311 | CACGUCUGGCAGCCAGGGU |
| 562 | GGCUGCCAGACGUGUGCAG | 5316 | CUGCACACGUCUGGCAGCC |
| 564 | CUGCCAGACGUGUGCAGCC | 5318 | GGCUGCACACGUCUGGCAG |
| 568 | CAGACGUGUGCAGCCUGUG | 5322 | CACAGGCUGCACACGUCUG |
| 691 | UGCUUCCUGCAUGACCUAG | 5445 | CUAGGUCAUGCAGGAAGCA |
| 692 | GCUUCCUGCAUGACCUAGA | 5446 | UCUAGGUCAUGCAGGAAGC |
| 693 | CUUCCUGCAUGACCUAGAG | 5447 | CUCUAGGUCAUGCAGGAAG |
| 717 | AGGGACAGCCGUGCAUCUG | 5471 | CAGAUGCACGGCUGUCCCU |
| 718 | GGGACAGCCGUGCAUCUGG | 5472 | CCAGAUGCACGGCUGUCCC |
| 721 | ACAGCCGUGCAUCUGGCAG | 5475 | CUGCCAGAUGCACGGCUGU |
| 722 | CAGCCGUGCAUCUGGCAGC | 5476 | GCUGCCAGAUGCACGGCUG |
| 723 | AGCCGUGCAUCUGGCAGCG | 5477 | CGCUGCCAGAUGCACGGCU |
| 724 | GCCGUGCAUCUGGCAGCGC | 5478 | GCGCUGCCAGAUGCACGGC |
| 725 | CCGUGCAUCUGGCAGCGCC | 5479 | GGCGCUGCCAGAUGCACGG |
| 726 | CGUGCAUCUGGCAGCGCCA | 5480 | UGGCGCUGCCAGAUGCACG |
| 753 | CUUCUCAGCCCACCAUAAC | 5507 | GUUAUGGUGGGCUGAGAAG |
| 759 | AGCCCACCAUAACCGGCCC | 5513 | GGGCCGGUUAUGGUGGGCU |
| 761 | CCCACCAUAACCGGCCCGA | 5515 | UCGGGCCGGUUAUGGUGGG |
| 762 | CCACCAUAACCGGCCCGAU | 5516 | AUCGGGCCGGUUAUGGUGG |
| 763 | CACCAUAACCGGCCCGAUG | 5517 | CAUCGGGCCGGUUAUGGUG |
| 764 | ACCAUAACCGGCCCGAUGA | 5518 | UCAUCGGGCCGGUUAUGGU |
| 765 | CCAUAACCGGCCCGAUGAC | 5519 | GUCAUCGGGCCGGUUAUGG |
| 766 | CAUAACCGGCCCGAUGACU | 5520 | AGUCAUCGGGCCGGUUAUG |
| 767 | AUAACCGGCCCGAUGACUG | 5521 | CAGUCAUCGGGCCGGUUAU |
| 775 | CCCGAUGACUGCCCCGACU | 5529 | AGUCGGGGCAGUCAUCGGG |
| 776 | CCGAUGACUGCCCCGACUG | 5530 | CAGUCGGGGCAGUCAUCGG |
| 777 | CGAUGACUGCCCCGACUGU | 5531 | ACAGUCGGGGCAGUCAUCG |
| 801 | CAGCCCAUUGGGCACCCGU | 5555 | ACGGGUGCCCAAUGGGCUG |
| 804 | CCCAUUGGGCACCCGUGUA | 5558 | UACACGGGUGCCCAAUGGG |
| 824 | CUGUGGUUGAGCAAGGCCA | 5578 | UGGCCUUGCUCAACCACAG |
| 826 | GUGGUUGAGCAAGGCCAGG | 5580 | CCUGGCCUUGCUCAACCAC |
| 837 | AGGCCAGGCCUCCUAUUUC | 5591 | GAAAUAGGAGGCCUGGCCU |
| 842 | AGGCCUCCUAUUUCUACGU | 5596 | ACGUAGAAAUAGGAGGCCU |
| 845 | CCUCCUAUUUCUACGUGGC | 5599 | GCCACGUAGAAAUAGGAGG |
| 854 | UCUACGUGGCAUCCUCACU | 5608 | AGUGAGGAUGCCACGUAGA |
| 855 | CUACGUGGCAUCCUCACUG | 5609 | CAGUGAGGAUGCCACGUAG |
| 863 | CAUCCUCACUGGACGCAGC | 5617 | GCUGCGUCCAGUGAGGAUG |
| 864 | AUCCUCACUGGACGCAGCC | 5618 | GGCUGCGUCCAGUGAGGAU |
| 866 | CCUCACUGGACGCAGCCGU | 5620 | ACGGCUGCGUCCAGUGAGG |
| 888 | UGCCAGCUUCAGCCCACGC | 5642 | GCGUGGGCUGAAGCUGGCA |
| 895 | UUCAGCCCACGCUCAGUGU | 5649 | ACACUGAGCGUGGGCUGAA |
| 897 | CAGCCCACGCUCAGUGUCU | 5651 | AGACACUGAGCGUGGGCUG |
| 898 | AGCCCACGCUCAGUGUCUA | 5652 | UAGACACUGAGCGUGGGCU |
| 899 | GCCCACGCUCAGUGUCUAU | 5653 | AUAGACACUGAGCGUGGGC |
| 900 | CCCACGCUCAGUGUCUAUC | 5654 | GAUAGACACUGAGCGUGGG |
| 901 | CCACGCUCAGUGUCUAUCA | 5655 | UGAUAGACACUGAGCGUGG |
| 903 | ACGCUCAGUGUCUAUCAGG | 5657 | CCUGAUAGACACUGAGCGU |
| 904 | CGCUCAGUGUCUAUCAGGC | 5658 | GCCUGAUAGACACUGAGCG |
| 907 | UCAGUGUCUAUCAGGCGUC | 5661 | GACGCCUGAUAGACACUGA |
| 908 | CAGUGUCUAUCAGGCGUCU | 5662 | AGACGCCUGAUAGACACUG |
| 909 | AGUGUCUAUCAGGCGUCUC | 5663 | GAGACGCCUGAUAGACACU |
| 910 | GUGUCUAUCAGGCGUCUCA | 5664 | UGAGACGCCUGAUAGACAC |
| 911 | UGUCUAUCAGGCGUCUCAA | 5665 | UUGAGACGCCUGAUAGACA |
| 912 | GUCUAUCAGGCGUCUCAAG | 5666 | CUUGAGACGCCUGAUAGAC |
| 913 | UCUAUCAGGCGUCUCAAGG | 5667 | CCUUGAGACGCCUGAUAGA |
| 915 | UAUCAGGCGUCUCAAGGCU | 5669 | AGCCUUGAGACGCCUGAUA |
| 948 | CGCACCGGGCUUUGUGGCG | 5702 | CGCCACAAAGCCCGGUGCG |
| 966 | GUUGUCAGUGCUGCCCAAG | 5720 | CUUGGGCAGCACUGACAAC |
| 976 | CUGCCCAAGCAUCUUGUCU | 5730 | AGACAAGAUGCUUGGGCAG |
| 977 | UGCCCAAGCAUCUUGUCUC | 5731 | GAGACAAGAUGCUUGGGCA |
| 985 | CAUCUUGUCUCCUACAGUA | 5739 | UACUGUAGGAGACAAGAUG |
| 986 | AUCUUGUCUCCUACAGUAU | 5740 | AUACUGUAGGAGACAAGAU |
| 989 | UUGUCUCCUACAGUAUUGA | 5743 | UCAAUACUGUAGGAGACAA |
| 990 | UGUCUCCUACAGUAUUGAA | 5744 | UUCAAUACUGUAGGAGACA |
| 992 | UCUCCUACAGUAUUGAAUA | 5746 | UAUUCAAUACUGUAGGAGA |
| 1001 | GUAUUGAAUACGUGCACAG | 5755 | CUGUGCACGUAUUCAAUAC |
| 1003 | AUUGAAUACGUGCACAGCU | 5757 | AGCUGUGCACGUAUUCAAU |
| 1004 | UUGAAUACGUGCACAGCUU | 5758 | AAGCUGUGCACGUAUUCAA |
| 1005 | UGAAUACGUGCACAGCUUC | 5759 | GAAGCUGUGCACGUAUUCA |
| 1006 | GAAUACGUGCACAGCUUCC | 5760 | GGAAGCUGUGCACGUAUUC |
| 1042 | UACUUCCUGACUGUACAGC | 5796 | GCUGUACAGUCAGGAAGUA |
| 1043 | ACUUCCUGACUGUACAGCC | 5797 | GGCUGUACAGUCAGGAAGU |
| 1046 | UCCUGACUGUACAGCCGGC | 5800 | GCCGGCUGUACAGUCAGGA |
| 1048 | CUGACUGUACAGCCGGCCA | 5802 | UGGCCGGCUGUACAGUCAG |
| 1049 | UGACUGUACAGCCGGCCAG | 5803 | CUGGCCGGCUGUACAGUCA |
| 1050 | GACUGUACAGCCGGCCAGC | 5804 | GCUGGCCGGCUGUACAGUC |
| 1051 | ACUGUACAGCCGGCCAGCG | 5805 | CGCUGGCCGGCUGUACAGU |
| 1053 | UGUACAGCCGGCCAGCGUG | 5807 | CACGCUGGCCGGCUGUACA |
| 1054 | GUACAGCCGGCCAGCGUGA | 5808 | UCACGCUGGCCGGCUGUAC |
| 1055 | UACAGCCGGCCAGCGUGAC | 5809 | GUCACGCUGGCCGGCUGUA |
| 1111 | CUUAGCGCCACUGAGCCAG | 5865 | CUGGCUCAGUGGCGCUAAG |
| 1121 | CUGAGCCAGAGUUGGGUGA | 5875 | UCACCCAACUCUGGCUCAG |
| 1124 | AGCCAGAGUUGGGUGACUA | 5878 | UAGUCACCCAACUCUGGCU |
| 1129 | GAGUUGGGUGACUAUCGGG | 5883 | CCCGAUAGUCACCCAACUC |
| 1130 | AGUUGGGUGACUAUCGGGA | 5884 | UCCCGAUAGUCACCCAACU |
| 1131 | GUUGGGUGACUAUCGGGAG | 5885 | CUCCCGAUAGUCACCCAAC |
| 1132 | UUGGGUGACUAUCGGGAGC | 5886 | GCUCCCGAUAGUCACCCAA |
| 1134 | GGGUGACUAUCGGGAGCUG | 5888 | CAGCUCCCGAUAGUCACCC |
| 1137 | UGACUAUCGGGAGCUGGUC | 5891 | GACCAGCUCCCGAUAGUCA |
| 1138 | GACUAUCGGGAGCUGGUCC | 5892 | GGACCAGCUCCCGAUAGUC |
| 1139 | ACUAUCGGGAGCUGGUCCU | 5893 | AGGACCAGCUCCCGAUAGU |
| 1145 | GGGAGCUGGUCCUCGACUG | 5899 | CAGUCGAGGACCAGCUCCC |
| 1146 | GGAGCUGGUCCUCGACUGC | 5900 | GCAGUCGAGGACCAGCUCC |
| 1147 | GAGCUGGUCCUCGACUGCA | 5901 | UGCAGUCGAGGACCAGCUC |
| 1152 | GGUCCUCGACUGCAGAUUU | 5906 | AAAUCUGCAGUCGAGGACC |
| 1153 | GUCCUCGACUGCAGAUUUG | 5907 | CAAAUCUGCAGUCGAGGAC |
| 1154 | UCCUCGACUGCAGAUUUGC | 5908 | GCAAAUCUGCAGUCGAGGA |
| 1155 | CCUCGACUGCAGAUUUGCU | 5909 | AGCAAAUCUGCAGUCGAGG |
| 1156 | CUCGACUGCAGAUUUGCUC | 5910 | GAGCAAAUCUGCAGUCGAG |
| 1157 | UCGACUGCAGAUUUGCUCC | 5911 | GGAGCAAAUCUGCAGUCGA |
| 1158 | CGACUGCAGAUUUGCUCCA | 5912 | UGGAGCAAAUCUGCAGUCG |
| 1161 | CUGCAGAUUUGCUCCAAAA | 5915 | UUUUGGAGCAAAUCUGCAG |
| 1162 | UGCAGAUUUGCUCCAAAAC | 5916 | GUUUUGGAGCAAAUCUGCA |
| 1164 | CAGAUUUGCUCCAAAACGC | 5918 | GCGUUUUGGAGCAAAUCUG |
| 1165 | AGAUUUGCUCCAAAACGCA | 5919 | UGCGUUUUGGAGCAAAUCU |
| 1166 | GAUUUGCUCCAAAACGCAG | 5920 | CUGCGUUUUGGAGCAAAUC |
| 1170 | UGCUCCAAAACGCAGGCGC | 5924 | GCGCCUGCGUUUUGGAGCA |
| 1171 | GCUCCAAAACGCAGGCGCC | 5925 | GGCGCCUGCGUUUUGGAGC |
| 1172 | CUCCAAAACGCAGGCGCCG | 5926 | CGGCGCCUGCGUUUUGGAG |
| 1173 | UCCAAAACGCAGGCGCCGG | 5927 | CCGGCGCCUGCGUUUUGGA |
| 1204 | GGCGGACAGCCCUACCCUG | 5958 | CAGGGUAGGGCUGUCCGCC |
| 1350 | CAACUCUGUCGUCUGUGCC | 6104 | GGCACAGACGACAGAGUUG |
| 1356 | UGUCGUCUGUGCCUUCCCC | 6110 | GGGGAAGGCACAGACGACA |
| 1405 | GGUGUGGAGCGCUGUUGUG | 6159 | CACAACAGCGCUCCACACC |
| 1406 | GUGUGGAGCGCUGUUGUGA | 6160 | UCACAACAGCGCUCCACAC |
| 1408 | GUGGAGCGCUGUUGUGAAU | 6162 | AUUCACAACAGCGCUCCAC |
| 1409 | UGGAGCGCUGUUGUGAAUC | 6163 | GAUUCACAACAGCGCUCCA |
| 1411 | GAGCGCUGUUGUGAAUCCC | 6165 | GGGAUUCACAACAGCGCUC |
| 1421 | GUGAAUCCCCAGUCCAUCC | 6175 | GGAUGGACUGGGGAUUCAC |
| 1443 | CCUCCGGCGAGGCCUCGAC | 6197 | GUCGAGGCCUCGCCGGAGG |
| 1444 | CUCCGGCGAGGCCUCGACU | 6198 | AGUCGAGGCCUCGCCGGAG |
| 1445 | UCCGGCGAGGCCUCGACUU | 6199 | AAGUCGAGGCCUCGCCGGA |
| 1446 | CCGGCGAGGCCUCGACUUC | 6200 | GAAGUCGAGGCCUCGCCGG |
| 1447 | CGGCGAGGCCUCGACUUCU | 6201 | AGAAGUCGAGGCCUCGCCG |
| 1476 | CAGUUUUUGCCCCAACCCG | 6230 | CGGGUUGGGGCAAAAACUG |
| 1857 | GACCUGUGGGCGUUGCCUA | 6611 | UAGGCAACGCCCACAGGUC |
| 1858 | ACCUGUGGGCGUUGCCUAA | 6612 | UUAGGCAACGCCCACAGGU |
| 1862 | GUGGGCGUUGCCUAAGGGC | 6616 | GCCCUUAGGCAACGCCCAC |
| 1863 | UGGGCGUUGCCUAAGGGCA | 6617 | UGCCCUUAGGCAACGCCCA |
| 1969 | CCUAAGCUUACUGAGUUCC | 6723 | GGAACUCAGUAAGCUUAGG |
| 2124 | CAAGGACAGCUCAAAACUC | 6878 | GAGUUUUGAGCUGUCCUUG |
| 2125 | AAGGACAGCUCAAAACUCA | 6879 | UGAGUUUUGAGCUGUCCUU |
| 2142 | CAGACCAGUGCCCCGGAAA | 6896 | UUUCCGGGGCACUGGUCUG |
| 2143 | AGACCAGUGCCCCGGAAAG | 6897 | CUUUCCGGGGCACUGGUCU |
| 2144 | GACCAGUGCCCCGGAAAGA | 6898 | UCUUUCCGGGGCACUGGUC |
| 2148 | AGUGCCCCGGAAAGACUUU | 6902 | AAAGUCUUUCCGGGGCACU |
| 2149 | GUGCCCCGGAAAGACUUUG | 6903 | CAAAGUCUUUCCGGGGCAC |
| 2150 | UGCCCCGGAAAGACUUUGU | 6904 | ACAAAGUCUUUCCGGGGCA |
| 2151 | GCCCCGGAAAGACUUUGUA | 6905 | UACAAAGUCUUUCCGGGGC |
| 2152 | CCCCGGAAAGACUUUGUAG | 6906 | CUACAAAGUCUUUCCGGGG |
| 2153 | CCCGGAAAGACUUUGUAGA | 6907 | UCUACAAAGUCUUUCCGGG |
| 2154 | CCGGAAAGACUUUGUAGAG | 6908 | CUCUACAAAGUCUUUCCGG |
| 2165 | UUGUAGAGGAGUUUGAGUG | 6919 | CACUCAAACUCCUCUACAA |
| 2180 | AGUGUGAACUGGAGCCCUU | 6934 | AAGGGCUCCAGUUCACACU |
| 2208 | GGCAGUGGGGCCUACCAAC | 6962 | GUUGGUAGGCCCCACUGCC |
| 2226 | CGUCAGCCUCACCGUGACU | 6980 | AGUCACGGUGAGGCUGACG |
| 2228 | UCAGCCUCACCGUGACUAA | 6982 | UUAGUCACGGUGAGGCUGA |
| 2229 | CAGCCUCACCGUGACUAAC | 6983 | GUUAGUCACGGUGAGGCUG |
| 2230 | AGCCUCACCGUGACUAACA | 6984 | UGUUAGUCACGGUGAGGCU |
| 2232 | CCUCACCGUGACUAACAUG | 6986 | CAUGUUAGUCACGGUGAGG |
| 2233 | CUCACCGUGACUAACAUGC | 6987 | GCAUGUUAGUCACGGUGAG |
| 2234 | UCACCGUGACUAACAUGCC | 6988 | GGCAUGUUAGUCACGGUGA |
| 2235 | CACCGUGACUAACAUGCCA | 6989 | UGGCAUGUUAGUCACGGUG |
| 2237 | CCGUGACUAACAUGCCACC | 6991 | GGUGGCAUGUUAGUCACGG |
| 2240 | UGACUAACAUGCCACCGGG | 6994 | CCCGGUGGCAUGUUAGUCA |
| 2241 | GACUAACAUGCCACCGGGC | 6995 | GCCCGGUGGCAUGUUAGUC |
| 2242 | ACUAACAUGCCACCGGGCA | 6996 | UGCCCGGUGGCAUGUUAGU |
| 2243 | CUAACAUGCCACCGGGCAA | 6997 | UUGCCCGGUGGCAUGUUAG |
| 2244 | UAACAUGCCACCGGGCAAG | 6998 | CUUGCCCGGUGGCAUGUUA |
| 2245 | AACAUGCCACCGGGCAAGC | 6999 | GCUUGCCCGGUGGCAUGUU |
| 2246 | ACAUGCCACCGGGCAAGCA | 7000 | UGCUUGCCCGGUGGCAUGU |
| 2252 | CACCGGGCAAGCACUUCCG | 7006 | CGGAAGUGCUUGCCCGGUG |
| 2253 | ACCGGGCAAGCACUUCCGG | 7007 | CCGGAAGUGCUUGCCCGGU |
| 2257 | GGCAAGCACUUCCGGGUAG | 7011 | CUACCCGGAAGUGCUUGCC |
| 2258 | GCAAGCACUUCCGGGUAGA | 7012 | UCUACCCGGAAGUGCUUGC |
| 2259 | CAAGCACUUCCGGGUAGAC | 7013 | GUCUACCCGGAAGUGCUUG |
| 2263 | CACUUCCGGGUAGACGGCA | 7017 | UGCCGUCUACCCGGAAGUG |
| 2264 | ACUUCCGGGUAGACGGCAC | 7018 | GUGCCGUCUACCCGGAAGU |
| 2265 | CUUCCGGGUAGACGGCACC | 7019 | GGUGCCGUCUACCCGGAAG |
| 2266 | UUCCGGGUAGACGGCACCU | 7020 | AGGUGCCGUCUACCCGGAA |
| 2267 | UCCGGGUAGACGGCACCUC | 7021 | GAGGUGCCGUCUACCCGGA |
| 2269 | CGGGUAGACGGCACCUCCG | 7023 | CGGAGGUGCCGUCUACCCG |
| 2318 | UGCUGAUAGCAGUGCAACC | 7072 | GGUUGCACUGCUAUCAGCA |
| 2319 | GCUGAUAGCAGUGCAACCC | 7073 | GGGUUGCACUGCUAUCAGC |
| 2320 | CUGAUAGCAGUGCAACCCC | 7074 | GGGGUUGCACUGCUAUCAG |
| 2322 | GAUAGCAGUGCAACCCCUC | 7076 | GAGGGGUUGCACUGCUAUC |
| 2332 | CAACCCCUCUUUGGCCCAC | 7086 | GUGGGCCAAAGAGGGGUUG |
| 2366 | GUCUCACUCUUGAAGGCCA | 7120 | UGGCCUUCAAGAGUGAGAC |
| 2369 | UCACUCUUGAAGGCCAGAG | 7123 | CUCUGGCCUUCAAGAGUGA |
| 2371 | ACUCUUGAAGGCCAGAGUC | 7125 | GACUCUGGCCUUCAAGAGU |
| 2386 | AGUCUGUCUGUAGGCACCA | 7140 | UGGUGCCUACAGACAGACU |
| 2412 | UGUGCUGGUCAAUGGGACU | 7166 | AGUCCCAUUGACCAGCACA |
| 2413 | GUGCUGGUCAAUGGGACUG | 7167 | CAGUCCCAUUGACCAGCAC |
| 2418 | GGUCAAUGGGACUGAGUGU | 7172 | ACACUCAGUCCCAUUGACC |
| 2420 | UCAAUGGGACUGAGUGUCU | 7174 | AGACACUCAGUCCCAUUGA |
| 2421 | CAAUGGGACUGAGUGUCUG | 7175 | CAGACACUCAGUCCCAUUG |
| 2422 | AAUGGGACUGAGUGUCUGC | 7176 | GCAGACACUCAGUCCCAUU |
| 2425 | GGGACUGAGUGUCUGCUAG | 7179 | CUAGCAGACACUCAGUCCC |
| 2427 | GACUGAGUGUCUGCUAGCA | 7181 | UGCUAGCAGACACUCAGUC |
| 2430 | UGAGUGUCUGCUAGCACGG | 7184 | CCGUGCUAGCAGACACUCA |
| 2432 | AGUGUCUGCUAGCACGGGU | 7186 | ACCCGUGCUAGCAGACACU |
| 2435 | GUCUGCUAGCACGGGUCAG | 7189 | CUGACCCGUGCUAGCAGAC |
| 2437 | CUGCUAGCACGGGUCAGUG | 7191 | CACUGACCCGUGCUAGCAG |
| 2438 | UGCUAGCACGGGUCAGUGA | 7192 | UCACUGACCCGUGCUAGCA |
| 2440 | CUAGCACGGGUCAGUGAGG | 7194 | CCUCACUGACCCGUGCUAG |
| 2443 | GCACGGGUCAGUGAGGGGC | 7197 | GCCCCUCACUGACCCGUGC |
| 2445 | ACGGGUCAGUGAGGGGCAG | 7199 | CUGCCCCUCACUGACCCGU |
| 2455 | GAGGGGCAGCUUUUAUGUG | 7209 | CACAUAAAAGCUGCCCCUC |
| 2460 | GCAGCUUUUAUGUGCCACA | 7214 | UGUGGCACAUAAAAGCUGC |
| 2462 | AGCUUUUAUGUGCCACACC | 7216 | GGUGUGGCACAUAAAAGCU |
| 2464 | CUUUUAUGUGCCACACCCC | 7218 | GGGGUGUGGCACAUAAAAG |
| 2566 | GAAGACCCUGUCGUGCUAA | 7320 | UUAGCACGACAGGGUCUUC |
| 2567 | AAGACCCUGUCGUGCUAAG | 7321 | CUUAGCACGACAGGGUCUU |
| 2571 | CCCUGUCGUGCUAAGCAUC | 7325 | GAUGCUUAGCACGACAGGG |
| 2572 | CCUGUCGUGCUAAGCAUCA | 7326 | UGAUGCUUAGCACGACAGG |
| 2575 | GUCGUGCUAAGCAUCAGCC | 7329 | GGCUGAUGCUUAGCACGAC |
| 2577 | CGUGCUAAGCAUCAGCCCC | 7331 | GGGGCUGAUGCUUAGCACG |
| 2581 | CUAAGCAUCAGCCCCAACU | 7335 | AGUUGGGGCUGAUGCUUAG |
| 2582 | UAAGCAUCAGCCCCAACUG | 7336 | CAGUUGGGGCUGAUGCUUA |
| 2584 | AGCAUCAGCCCCAACUGUG | 7338 | CACAGUUGGGGCUGAUGCU |
| 2628 | CUGUGGCCAGCAUCUAACU | 7382 | AGUUAGAUGCUGGCCACAG |
| 2629 | UGUGGCCAGCAUCUAACUU | 7383 | AAGUUAGAUGCUGGCCACA |
| 2644 | ACUUCAGCAUGGCACUUAG | 7398 | CUAAGUGCCAUGCUGAAGU |
| 2646 | UUCAGCAUGGCACUUAGUG | 7400 | CACUAAGUGCCAUGCUGAA |
| 2648 | CAGCAUGGCACUUAGUGCU | 7402 | AGCACUAAGUGCCAUGCUG |
| 2652 | AUGGCACUUAGUGCUGUCA | 7406 | UGACAGCACUAAGUGCCAU |
| 2655 | GCACUUAGUGCUGUCAUUC | 7409 | GAAUGACAGCACUAAGUGC |
| 2656 | CACUUAGUGCUGUCAUUCC | 7410 | GGAAUGACAGCACUAAGUG |
| 2661 | AGUGCUGUCAUUCCAUGAC | 7415 | GUCAUGGAAUGACAGCACU |
| 2663 | UGCUGUCAUUCCAUGACGG | 7417 | CCGUCAUGGAAUGACAGCA |
| 2664 | GCUGUCAUUCCAUGACGGG | 7418 | CCCGUCAUGGAAUGACAGC |
| 2666 | UGUCAUUCCAUGACGGGCU | 7420 | AGCCCGUCAUGGAAUGACA |
| 2668 | UCAUUCCAUGACGGGCUUA | 7422 | UAAGCCCGUCAUGGAAUGA |
| 2669 | CAUUCCAUGACGGGCUUAG | 7423 | CUAAGCCCGUCAUGGAAUG |
| 2670 | AUUCCAUGACGGGCUUAGG | 7424 | CCUAAGCCCGUCAUGGAAU |
| 2671 | UUCCAUGACGGGCUUAGGG | 7425 | CCCUAAGCCCGUCAUGGAA |
| 2673 | CCAUGACGGGCUUAGGGCA | 7427 | UGCCCUAAGCCCGUCAUGG |
| 2676 | UGACGGGCUUAGGGCAGUG | 7430 | CACUGCCCUAAGCCCGUCA |
| 2678 | ACGGGCUUAGGGCAGUGGA | 7432 | UCCACUGCCCUAAGCCCGU |
| 2808 | AGCUGCUGGCUUUACACUG | 7562 | CAGUGUAAAGCCAGCAGCU |
| 2816 | GCUUUACACUGCCUGGCUU | 7570 | AAGCCAGGCAGUGUAAAGC |
| 2887 | CCUGAGGAGCAUGCCAUUA | 7641 | UAAUGGCAUGCUCCUCAGG |
| 2889 | UGAGGAGCAUGCCAUUAAG | 7643 | CUUAAUGGCAUGCUCCUCA |
| 2891 | AGGAGCAUGCCAUUAAGUU | 7645 | AACUUAAUGGCAUGCUCCU |
| 2895 | GCAUGCCAUUAAGUUUGAG | 7649 | CUCAAACUUAAUGGCAUGC |
| 3084 | UAUCCUGGGUAGAGUGGUG | 7838 | CACCACUCUACCCAGGAUA |
| 3186 | UGCACUGGUCUUCAGCUAC | 7940 | GUAGCUGAAGACCAGUGCA |
| 3191 | UGGUCUUCAGCUACUGGUG | 7945 | CACCAGUAGCUGAAGACCA |
| 3192 | GGUCUUCAGCUACUGGUGG | 7946 | CCACCAGUAGCUGAAGACC |
| 3223 | CUAGUUCUUCCUCCCAACC | 7977 | GGUUGGGAGGAAGAACUAG |
| 3279 | CACACCCCUGCCUAUUCUG | 8033 | CAGAAUAGGCAGGGGUGUG |
| 3297 | GUACUCGGGCUCUGACUAC | 8051 | GUAGUCAGAGCCCGAGUAC |
| 3298 | UACUCGGGCUCUGACUACA | 8052 | UGUAGUCAGAGCCCGAGUA |
| 3299 | ACUCGGGCUCUGACUACAG | 8053 | CUGUAGUCAGAGCCCGAGU |
| 3300 | CUCGGGCUCUGACUACAGA | 8054 | UCUGUAGUCAGAGCCCGAG |
| 3301 | UCGGGCUCUGACUACAGAA | 8055 | UUCUGUAGUCAGAGCCCGA |
| 3537 | CCACUUUGGAGUUGUCUAC | 8291 | GUAGACAACUCCAAAGUGG |
| 3538 | CACUUUGGAGUUGUCUACC | 8292 | GGUAGACAACUCCAAAGUG |
| 3560 | GAGAAUACAUAGACCAGGC | 8314 | GCCUGGUCUAUGUAUUCUC |
| 3563 | AAUACAUAGACCAGGCCCA | 8317 | UGGGCCUGGUCUAUGUAUU |
| 3564 | AUACAUAGACCAGGCCCAG | 8318 | CUGGGCCUGGUCUAUGUAU |
| 3568 | AUAGACCAGGCCCAGAAUC | 8322 | GAUUCUGGGCCUGGUCUAU |
| 3570 | AGACCAGGCCCAGAAUCGA | 8324 | UCGAUUCUGGGCCUGGUCU |
| 3574 | CAGGCCCAGAAUCGAAUCC | 8328 | GGAUUCGAUUCUGGGCCUG |
| 3576 | GGCCCAGAAUCGAAUCCAA | 8330 | UUGGAUUCGAUUCUGGGCC |
| 3577 | GCCCAGAAUCGAAUCCAAU | 8331 | AUUGGAUUCGAUUCUGGGC |
| 3578 | CCCAGAAUCGAAUCCAAUG | 8332 | CAUUGGAUUCGAUUCUGGG |
| 3580 | CAGAAUCGAAUCCAAUGUG | 8334 | CACAUUGGAUUCGAUUCUG |
| 3581 | AGAAUCGAAUCCAAUGUGC | 8335 | GCACAUUGGAUUCGAUUCU |
| 3582 | GAAUCGAAUCCAAUGUGCC | 8336 | GGCACAUUGGAUUCGAUUC |
| 3583 | AAUCGAAUCCAAUGUGCCA | 8337 | UGGCACAUUGGAUUCGAUU |
| 3584 | AUCGAAUCCAAUGUGCCAU | 8338 | AUGGCACAUUGGAUUCGAU |
| 3586 | CGAAUCCAAUGUGCCAUCA | 8340 | UGAUGGCACAUUGGAUUCG |
| 3587 | GAAUCCAAUGUGCCAUCAA | 8341 | UUGAUGGCACAUUGGAUUC |
| 3588 | AAUCCAAUGUGCCAUCAAG | 8342 | CUUGAUGGCACAUUGGAUU |
| 3592 | CAAUGUGCCAUCAAGUCAC | 8346 | GUGACUUGAUGGCACAUUG |
| 3594 | AUGUGCCAUCAAGUCACUA | 8348 | UAGUGACUUGAUGGCACAU |
| 3595 | UGUGCCAUCAAGUCACUAA | 8349 | UUAGUGACUUGAUGGCACA |
| 3596 | GUGCCAUCAAGUCACUAAG | 8350 | CUUAGUGACUUGAUGGCAC |
| 3597 | UGCCAUCAAGUCACUAAGU | 8351 | ACUUAGUGACUUGAUGGCA |
| 3600 | CAUCAAGUCACUAAGUCGC | 8354 | GCGACUUAGUGACUUGAUG |
| 3655 | GAGGGGCUGCUCAUGCGUG | 8409 | CACGCAUGAGCAGCCCCUC |
| 3656 | AGGGGCUGCUCAUGCGUGG | 8410 | CCACGCAUGAGCAGCCCCU |
| 3657 | GGGGCUGCUCAUGCGUGGC | 8411 | GCCACGCAUGAGCAGCCCC |
| 3659 | GGCUGCUCAUGCGUGGCCU | 8413 | AGGCCACGCAUGAGCAGCC |
| 3663 | GCUCAUGCGUGGCCUGAAC | 8417 | GUUCAGGCCACGCAUGAGC |
| 3666 | CAUGCGUGGCCUGAACCAC | 8420 | GUGGUUCAGGCCACGCAUG |
| 3670 | CGUGGCCUGAACCACCCGA | 8424 | UCGGGUGGUUCAGGCCACG |
| 3671 | GUGGCCUGAACCACCCGAA | 8425 | UUCGGGUGGUUCAGGCCAC |
| 3672 | UGGCCUGAACCACCCGAAU | 8426 | AUUCGGGUGGUUCAGGCCA |
| 3673 | GGCCUGAACCACCCGAAUG | 8427 | CAUUCGGGUGGUUCAGGCC |
| 3674 | GCCUGAACCACCCGAAUGU | 8428 | ACAUUCGGGUGGUUCAGGC |
| 3676 | CUGAACCACCCGAAUGUGC | 8430 | GCACAUUCGGGUGGUUCAG |
| 3685 | CCGAAUGUGCUGGCUCUCA | 8439 | UGAGAGCCAGCACAUUCGG |
| 3701 | UCAUUGGUAUCAUGUUGCC | 8455 | GGCAACAUGAUACCAAUGA |
| 3702 | CAUUGGUAUCAUGUUGCCA | 8456 | UGGCAACAUGAUACCAAUG |
| 3705 | UGGUAUCAUGUUGCCACCU | 8459 | AGGUGGCAACAUGAUACCA |
| 3742 | CUGCUGCCCUAUAUGUGCC | 8496 | GGCACAUAUAGGGCAGCAG |
| 3746 | UGCCCUAUAUGUGCCACGG | 8500 | CCGUGGCACAUAUAGGGCA |
| 3748 | CCCUAUAUGUGCCACGGUG | 8502 | CACCGUGGCACAUAUAGGG |
| 3749 | CCUAUAUGUGCCACGGUGA | 8503 | UCACCGUGGCACAUAUAGG |
| 3750 | CUAUAUGUGCCACGGUGAC | 8504 | GUCACCGUGGCACAUAUAG |
| 3751 | UAUAUGUGCCACGGUGACC | 8505 | GGUCACCGUGGCACAUAUA |
| 3752 | AUAUGUGCCACGGUGACCU | 8506 | AGGUCACCGUGGCACAUAU |
| 3755 | UGUGCCACGGUGACCUGCU | 8509 | AGCAGGUCACCGUGGCACA |
| 3756 | GUGCCACGGUGACCUGCUC | 8510 | GAGCAGGUCACCGUGGCAC |
| 3762 | CGGUGACCUGCUCCAGUUC | 8516 | GAACUGGAGCAGGUCACCG |
| 3770 | UGCUCCAGUUCAUCCGCUC | 8524 | GAGCGGAUGAACUGGAGCA |
| 3771 | GCUCCAGUUCAUCCGCUCA | 8525 | UGAGCGGAUGAACUGGAGC |
| 3773 | UCCAGUUCAUCCGCUCACC | 8527 | GGUGAGCGGAUGAACUGGA |
| 3775 | CAGUUCAUCCGCUCACCUC | 8529 | GAGGUGAGCGGAUGAACUG |
| 3777 | GUUCAUCCGCUCACCUCAG | 8531 | CUGAGGUGAGCGGAUGAAC |
| 3781 | AUCCGCUCACCUCAGCGGA | 8535 | UCCGCUGAGGUGAGCGGAU |
| 3783 | CCGCUCACCUCAGCGGAAC | 8537 | GUUCCGCUGAGGUGAGCGG |
| 3788 | CACCUCAGCGGAACCCCAC | 8542 | GUGGGGUUCCGCUGAGGUG |
| 3791 | CUCAGCGGAACCCCACCGU | 8545 | ACGGUGGGGUUCCGCUGAG |
| 3793 | CAGCGGAACCCCACCGUGA | 8547 | UCACGGUGGGGUUCCGCUG |
| 3794 | AGCGGAACCCCACCGUGAA | 8548 | UUCACGGUGGGGUUCCGCU |
| 3795 | GCGGAACCCCACCGUGAAG | 8549 | CUUCACGGUGGGGUUCCGC |
| 3796 | CGGAACCCCACCGUGAAGG | 8550 | CCUUCACGGUGGGGUUCCG |
| 3798 | GAACCCCACCGUGAAGGAC | 8552 | GUCCUUCACGGUGGGGUUC |
| 3799 | AACCCCACCGUGAAGGACC | 8553 | GGUCCUUCACGGUGGGGUU |
| 3800 | ACCCCACCGUGAAGGACCU | 8554 | AGGUCCUUCACGGUGGGGU |
| 3801 | CCCCACCGUGAAGGACCUC | 8555 | GAGGUCCUUCACGGUGGGG |
| 3871 | AAGUUUGUGCACAGGGACC | 8625 | GGUCCCUGUGCACAAACUU |
| 4284 | GGUGGAGCAGAUAGUGUCU | 9038 | AGACACUAUCUGCUCCACC |
| 4292 | AGAUAGUGUCUGCACUGCU | 9046 | AGCAGUGCAGACACUAUCU |
| 4308 | GCUUGGGGACCAUUAUGUG | 9062 | CACAUAAUGGUCCCCAAGC |
| 4311 | UGGGGACCAUUAUGUGCAG | 9065 | CUGCACAUAAUGGUCCCCA |
| 4313 | GGGACCAUUAUGUGCAGCU | 9067 | AGCUGCACAUAAUGGUCCC |
| 4333 | CCAGCAACCUACAUGAACU | 9087 | AGUUCAUGUAGGUUGCUGG |
| 4449 | GCCUCCUCGGCCCACUUGA | 9203 | UCAAGUGGGCCGAGGAGGC |

[0237] The siRNAs in subset A have the following characteristics:
[0238] Cross-reactivity: With 19mer in human MST1R mRNA, with 17mer/19mer in NHP MST1R
[0239] Specificity category: For human and NHP: AS2 or better, SS3 or better
[0240] miRNA seeds: AS+SS strand: seed region not conserved in human, mouse, and rat and not present in >4 species
[0241] Off-target frequency: ≤20 human off-targets matched with 2 mismatches in antisense strand
[0242] SNPs: siRNA target sites do not harbor SNPs with a MAF ≥1% (pos. 2-18)

[0243] The siRNA sequences in subset A were selected for more stringent specificity to yield subset B. Subset B includes 297 siRNAs whose base sequences are shown in Table 4.

TABLE 4
Sequences in siRNA subset B

| SEQ ID | sense strand sequence | SEQ ID | antisense strand sequence |
|---|---|---|---|
| NO: | (5′-3′) | NO: | (5′-3′) |
| 469 | GCUGUGUUUGUAGCCAUAC | 5223 | GUAUGGCUACAAACACAGC |
| 471 | UGUGUUUGUAGCCAUACGC | 5225 | GCGUAUGGCUACAAACACA |
| 472 | GUGUUUGUAGCCAUACGCA | 5226 | UGCGUAUGGCUACAAACAC |
| 473 | UGUUUGUAGCCAUACGCAA | 5227 | UUGCGUAUGGCUACAAACA |
| 474 | GUUUGUAGCCAUACGCAAU | 5228 | AUUGCGUAUGGCUACAAAC |
| 475 | UUUGUAGCCAUACGCAAUC | 5229 | GAUUGCGUAUGGCUACAAA |
| 476 | UUGUAGCCAUACGCAAUCG | 5230 | CGAUUGCGUAUGGCUACAA |
| 477 | UGUAGCCAUACGCAAUCGC | 5231 | GCGAUUGCGUAUGGCUACA |
| 478 | GUAGCCAUACGCAAUCGCC | 5232 | GGCGAUUGCGUAUGGCUAC |
| 479 | UAGCCAUACGCAAUCGCCU | 5233 | AGGCGAUUGCGUAUGGCUA |
| 480 | AGCCAUACGCAAUCGCCUG | 5234 | CAGGCGAUUGCGUAUGGCU |
| 481 | GCCAUACGCAAUCGCCUGC | 5235 | GCAGGCGAUUGCGUAUGGC |
| 482 | CCAUACGCAAUCGCCUGCA | 5236 | UGCAGGCGAUUGCGUAUGG |
| 483 | CAUACGCAAUCGCCUGCAU | 5237 | AUGCAGGCGAUUGCGUAUG |
| 562 | GGCUGCCAGACGUGUGCAG | 5316 | CUGCACACGUCUGGCAGCC |
| 564 | CUGCCAGACGUGUGCAGCC | 5318 | GGCUGCACACGUCUGGCAG |
| 568 | CAGACGUGUGCAGCCUGUG | 5322 | CACAGGCUGCACACGUCUG |
| 691 | UGCUUCCUGCAUGACCUAG | 5445 | CUAGGUCAUGCAGGAAGCA |
| 692 | GCUUCCUGCAUGACCUAGA | 5446 | UCUAGGUCAUGCAGGAAGC |
| 693 | CUUCCUGCAUGACCUAGAG | 5447 | CUCUAGGUCAUGCAGGAAG |
| 717 | AGGGACAGCCGUGCAUCUG | 5471 | CAGAUGCACGGCUGUCCCU |
| 718 | GGGACAGCCGUGCAUCUGG | 5472 | CCAGAUGCACGGCUGUCCC |
| 721 | ACAGCCGUGCAUCUGGCAG | 5475 | CUGCCAGAUGCACGGCUGU |
| 722 | CAGCCGUGCAUCUGGCAGC | 5476 | GCUGCCAGAUGCACGGCUG |
| 724 | GCCGUGCAUCUGGCAGCGC | 5478 | GCGCUGCCAGAUGCACGGC |
| 725 | CCGUGCAUCUGGCAGCGCC | 5479 | GGCGCUGCCAGAUGCACGG |
| 726 | CGUGCAUCUGGCAGCGCCA | 5480 | UGGCGCUGCCAGAUGCACG |
| 753 | CUUCUCAGCCCACCAUAAC | 5507 | GUUAUGGUGGGCUGAGAAG |
| 759 | AGCCCACCAUAACCGGCCC | 5513 | GGGCCGGUUAUGGUGGGCU |
| 761 | CCCACCAUAACCGGCCCGA | 5515 | UCGGGCCGGUUAUGGUGGG |
| 762 | CCACCAUAACCGGCCCGAU | 5516 | AUCGGGCCGGUUAUGGUGG |
| 763 | CACCAUAACCGGCCCGAUG | 5517 | CAUCGGGCCGGUUAUGGUG |
| 764 | ACCAUAACCGGCCCGAUGA | 5518 | UCAUCGGGCCGGUUAUGGU |
| 765 | CCAUAACCGGCCCGAUGAC | 5519 | GUCAUCGGGCCGGUUAUGG |
| 766 | CAUAACCGGCCCGAUGACU | 5520 | AGUCAUCGGGCCGGUUAUG |
| 767 | AUAACCGGCCCGAUGACUG | 5521 | CAGUCAUCGGGCCGGUUAU |
| 775 | CCCGAUGACUGCCCCGACU | 5529 | AGUCGGGGCAGUCAUCGGG |
| 776 | CCGAUGACUGCCCCGACUG | 5530 | CAGUCGGGGCAGUCAUCGG |
| 777 | CGAUGACUGCCCCGACUGU | 5531 | ACAGUCGGGGCAGUCAUCG |
| 801 | CAGCCCAUUGGGCACCCGU | 5555 | ACGGGUGCCCAAUGGGCUG |
| 804 | CCCAUUGGGCACCCGUGUA | 5558 | UACACGGGUGCCCAAUGGG |
| 826 | GUGGUUGAGCAAGGCCAGG | 5580 | CCUGGCCUUGCUCAACCAC |
| 842 | AGGCCUCCUAUUUCUACGU | 5596 | ACGUAGAAAUAGGAGGCCU |
| 845 | CCUCCUAUUUCUACGUGGC | 5599 | GCCACGUAGAAAUAGGAGG |
| 854 | UCUACGUGGCAUCCUCACU | 5608 | AGUGAGGAUGCCACGUAGA |
| 855 | CUACGUGGCAUCCUCACUG | 5609 | CAGUGAGGAUGCCACGUAG |
| 863 | CAUCCUCACUGGACGCAGC | 5617 | GCUGCGUCCAGUGAGGAUG |
| 866 | CCUCACUGGACGCAGCCGU | 5620 | ACGGCUGCGUCCAGUGAGG |
| 895 | UUCAGCCCACGCUCAGUGU | 5649 | ACACUGAGCGUGGGCUGAA |
| 897 | CAGCCCACGCUCAGUGUCU | 5651 | AGACACUGAGCGUGGGCUG |
| 898 | AGCCCACGCUCAGUGUCUA | 5652 | UAGACACUGAGCGUGGGCU |
| 899 | GCCCACGCUCAGUGUCUAU | 5653 | AUAGACACUGAGCGUGGGC |
| 900 | CCCACGCUCAGUGUCUAUC | 5654 | GAUAGACACUGAGCGUGGG |
| 901 | CCACGCUCAGUGUCUAUCA | 5655 | UGAUAGACACUGAGCGUGG |
| 903 | ACGCUCAGUGUCUAUCAGG | 5657 | CCUGAUAGACACUGAGCGU |
| 904 | CGCUCAGUGUCUAUCAGGC | 5658 | GCCUGAUAGACACUGAGCG |
| 907 | UCAGUGUCUAUCAGGCGUC | 5661 | GACGCCUGAUAGACACUGA |
| 908 | CAGUGUCUAUCAGGCGUCU | 5662 | AGACGCCUGAUAGACACUG |
| 909 | AGUGUCUAUCAGGCGUCUC | 5663 | GAGACGCCUGAUAGACACU |
| 910 | GUGUCUAUCAGGCGUCUCA | 5664 | UGAGACGCCUGAUAGACAC |
| 911 | UGUCUAUCAGGCGUCUCAA | 5665 | UUGAGACGCCUGAUAGACA |
| 912 | GUCUAUCAGGCGUCUCAAG | 5666 | CUUGAGACGCCUGAUAGAC |
| 913 | UCUAUCAGGCGUCUCAAGG | 5667 | CCUUGAGACGCCUGAUAGA |
| 915 | UAUCAGGCGUCUCAAGGCU | 5669 | AGCCUUGAGACGCCUGAUA |
| 966 | GUUGUCAGUGCUGCCCAAG | 5720 | CUUGGGCAGCACUGACAAC |
| 976 | CUGCCCAAGCAUCUUGUCU | 5730 | AGACAAGAUGCUUGGGCAG |
| 977 | UGCCCAAGCAUCUUGUCUC | 5731 | GAGACAAGAUGCUUGGGCA |
| 985 | CAUCUUGUCUCCUACAGUA | 5739 | UACUGUAGGAGACAAGAUG |
| 986 | AUCUUGUCUCCUACAGUAU | 5740 | AUACUGUAGGAGACAAGAU |
| 992 | UCUCCUACAGUAUUGAAUA | 5746 | UAUUCAAUACUGUAGGAGA |
| 1001 | GUAUUGAAUACGUGCACAG | 5755 | CUGUGCACGUAUUCAAUAC |
| 1003 | AUUGAAUACGUGCACAGCU | 5757 | AGCUGUGCACGUAUUCAAU |
| 1004 | UUGAAUACGUGCACAGCUU | 5758 | AAGCUGUGCACGUAUUCAA |
| 1005 | UGAAUACGUGCACAGCUUC | 5759 | GAAGCUGUGCACGUAUUCA |
| 1046 | UCCUGACUGUACAGCCGGC | 5800 | GCCGGCUGUACAGUCAGGA |
| 1048 | CUGACUGUACAGCCGGCCA | 5802 | UGGCCGGCUGUACAGUCAG |
| 1049 | UGACUGUACAGCCGGCCAG | 5803 | CUGGCCGGCUGUACAGUCA |
| 1050 | GACUGUACAGCCGGCCAGC | 5804 | GCUGGCCGGCUGUACAGUC |
| 1051 | ACUGUACAGCCGGCCAGCG | 5805 | CGCUGGCCGGCUGUACAGU |
| 1053 | UGUACAGCCGGCCAGCGUG | 5807 | CACGCUGGCCGGCUGUACA |
| 1054 | GUACAGCCGGCCAGCGUGA | 5808 | UCACGCUGGCCGGCUGUAC |
| 1055 | UACAGCCGGCCAGCGUGAC | 5809 | GUCACGCUGGCCGGCUGUA |
| 1111 | CUUAGCGCCACUGAGCCAG | 5865 | CUGGCUCAGUGGCGCUAAG |
| 1129 | GAGUUGGGUGACUAUCGGG | 5883 | CCCGAUAGUCACCCAACUC |
| 1130 | AGUUGGGUGACUAUCGGGA | 5884 | UCCCGAUAGUCACCCAACU |
| 1131 | GUUGGGUGACUAUCGGGAG | 5885 | CUCCCGAUAGUCACCCAAC |
| 1132 | UUGGGUGACUAUCGGGAGC | 5886 | GCUCCCGAUAGUCACCCAA |
| 1134 | GGGUGACUAUCGGGAGCUG | 5888 | CAGCUCCCGAUAGUCACCC |
| 1137 | UGACUAUCGGGAGCUGGUC | 5891 | GACCAGCUCCCGAUAGUCA |
| 1138 | GACUAUCGGGAGCUGGUCC | 5892 | GGACCAGCUCCCGAUAGUC |
| 1139 | ACUAUCGGGAGCUGGUCCU | 5893 | AGGACCAGCUCCCGAUAGU |
| 1146 | GGAGCUGGUCCUCGACUGC | 5900 | GCAGUCGAGGACCAGCUCC |
| 1147 | GAGCUGGUCCUCGACUGCA | 5901 | UGCAGUCGAGGACCAGCUC |
| 1152 | GGUCCUCGACUGCAGAUUU | 5906 | AAAUCUGCAGUCGAGGACC |
| 1153 | GUCCUCGACUGCAGAUUUG | 5907 | CAAAUCUGCAGUCGAGGAC |
| 1154 | UCCUCGACUGCAGAUUUGC | 5908 | GCAAAUCUGCAGUCGAGGA |
| 1155 | CCUCGACUGCAGAUUUGCU | 5909 | AGCAAAUCUGCAGUCGAGG |
| 1156 | CUCGACUGCAGAUUUGCUC | 5910 | GAGCAAAUCUGCAGUCGAG |
| 1157 | UCGACUGCAGAUUUGCUCC | 5911 | GGAGCAAAUCUGCAGUCGA |
| 1158 | CGACUGCAGAUUUGCUCCA | 5912 | UGGAGCAAAUCUGCAGUCG |
| 1161 | CUGCAGAUUUGCUCCAAAA | 5915 | UUUUGGAGCAAAUCUGCAG |
| 1162 | UGCAGAUUUGCUCCAAAAC | 5916 | GUUUUGGAGCAAAUCUGCA |
| 1164 | CAGAUUUGCUCCAAAACGC | 5918 | GCGUUUUGGAGCAAAUCUG |
| 1165 | AGAUUUGCUCCAAAACGCA | 5919 | UGCGUUUUGGAGCAAAUCU |
| 1166 | GAUUUGCUCCAAAACGCAG | 5920 | CUGCGUUUUGGAGCAAAUC |
| 1170 | UGCUCCAAAACGCAGGCGC | 5924 | GCGCCUGCGUUUUGGAGCA |
| 1171 | GCUCCAAAACGCAGGCGCC | 5925 | GGCGCCUGCGUUUUGGAGC |
| 1172 | CUCCAAAACGCAGGCGCCG | 5926 | CGGCGCCUGCGUUUUGGAG |
| 1173 | UCCAAAACGCAGGCGCCGG | 5927 | CCGGCGCCUGCGUUUUGGA |
| 1204 | GGCGGACAGCCCUACCCUG | 5958 | CAGGGUAGGGCUGUCCGCC |
| 1350 | CAACUCUGUCGUCUGUGCC | 6104 | GGCACAGACGACAGAGUUG |
| 1405 | GGUGUGGAGCGCUGUUGUG | 6159 | CACAACAGCGCUCCACACC |
| 1406 | GUGUGGAGCGCUGUUGUGA | 6160 | UCACAACAGCGCUCCACAC |
| 1408 | GUGGAGCGCUGUUGUGAAU | 6162 | AUUCACAACAGCGCUCCAC |
| 1409 | UGGAGCGCUGUUGUGAAUC | 6163 | GAUUCACAACAGCGCUCCA |
| 1411 | GAGCGCUGUUGUGAAUCCC | 6165 | GGGAUUCACAACAGCGCUC |
| 1443 | CCUCCGGCGAGGCCUCGAC | 6197 | GUCGAGGCCUCGCCGGAGG |
| 1444 | CUCCGGCGAGGCCUCGACU | 6198 | AGUCGAGGCCUCGCCGGAG |
| 1445 | UCCGGCGAGGCCUCGACUU | 6199 | AAGUCGAGGCCUCGCCGGA |
| 1446 | CCGGCGAGGCCUCGACUUC | 6200 | GAAGUCGAGGCCUCGCCGG |
| 1447 | CGGCGAGGCCUCGACUUCU | 6201 | AGAAGUCGAGGCCUCGCCG |
| 1476 | CAGUUUUUGCCCCAACCCG | 6230 | CGGGUUGGGGCAAAAACUG |
| 1857 | GACCUGUGGGCGUUGCCUA | 6611 | UAGGCAACGCCCACAGGUC |
| 1858 | ACCUGUGGGCGUUGCCUAA | 6612 | UUAGGCAACGCCCACAGGU |
| 1862 | GUGGGCGUUGCCUAAGGGC | 6616 | GCCCUUAGGCAACGCCCAC |
| 1863 | UGGGCGUUGCCUAAGGGCA | 6617 | UGCCCUUAGGCAACGCCCA |
| 1969 | CCUAAGCUUACUGAGUUCC | 6723 | GGAACUCAGUAAGCUUAGG |
| 2125 | AAGGACAGCUCAAAACUCA | 6879 | UGAGUUUUGAGCUGUCCUU |
| 2142 | CAGACCAGUGCCCCGGAAA | 6896 | UUUCCGGGGCACUGGUCUG |
| 2143 | AGACCAGUGCCCCGGAAAG | 6897 | CUUUCCGGGGCACUGGUCU |
| 2144 | GACCAGUGCCCCGGAAAGA | 6898 | UCUUUCCGGGGCACUGGUC |
| 2148 | AGUGCCCCGGAAAGACUUU | 6902 | AAAGUCUUUCCGGGGCACU |
| 2149 | GUGCCCCGGAAAGACUUUG | 6903 | CAAAGUCUUUCCGGGGCAC |
| 2150 | UGCCCCGGAAAGACUUUGU | 6904 | ACAAAGUCUUUCCGGGGCA |
| 2151 | GCCCCGGAAAGACUUUGUA | 6905 | UACAAAGUCUUUCCGGGGC |
| 2152 | CCCCGGAAAGACUUUGUAG | 6906 | CUACAAAGUCUUUCCGGGG |
| 2153 | CCCGGAAAGACUUUGUAGA | 6907 | UCUACAAAGUCUUUCCGGG |
| 2154 | CCGGAAAGACUUUGUAGAG | 6908 | CUCUACAAAGUCUUUCCGG |
| 2208 | GGCAGUGGGGCCUACCAAC | 6962 | GUUGGUAGGCCCCACUGCC |
| 2226 | CGUCAGCCUCACCGUGACU | 6980 | AGUCACGGUGAGGCUGACG |
| 2228 | UCAGCCUCACCGUGACUAA | 6982 | UUAGUCACGGUGAGGCUGA |
| 2229 | CAGCCUCACCGUGACUAAC | 6983 | GUUAGUCACGGUGAGGCUG |
| 2230 | AGCCUCACCGUGACUAACA | 6984 | UGUUAGUCACGGUGAGGCU |
| 2232 | CCUCACCGUGACUAACAUG | 6986 | CAUGUUAGUCACGGUGAGG |
| 2233 | CUCACCGUGACUAACAUGC | 6987 | GCAUGUUAGUCACGGUGAG |
| 2234 | UCACCGUGACUAACAUGCC | 6988 | GGCAUGUUAGUCACGGUGA |
| 2235 | CACCGUGACUAACAUGCCA | 6989 | UGGCAUGUUAGUCACGGUG |
| 2237 | CCGUGACUAACAUGCCACC | 6991 | GGUGGCAUGUUAGUCACGG |
| 2240 | UGACUAACAUGCCACCGGG | 6994 | CCCGGUGGCAUGUUAGUCA |
| 2241 | GACUAACAUGCCACCGGGC | 6995 | GCCCGGUGGCAUGUUAGUC |
| 2242 | ACUAACAUGCCACCGGGCA | 6996 | UGCCCGGUGGCAUGUUAGU |
| 2243 | CUAACAUGCCACCGGGCAA | 6997 | UUGCCCGGUGGCAUGUUAG |
| 2244 | UAACAUGCCACCGGGCAAG | 6998 | CUUGCCCGGUGGCAUGUUA |
| 2245 | AACAUGCCACCGGGCAAGC | 6999 | GCUUGCCCGGUGGCAUGUU |
| 2246 | ACAUGCCACCGGGCAAGCA | 7000 | UGCUUGCCCGGUGGCAUGU |
| 2252 | CACCGGGCAAGCACUUCCG | 7006 | CGGAAGUGCUUGCCCGGUG |
| 2253 | ACCGGGCAAGCACUUCCGG | 7007 | CCGGAAGUGCUUGCCCGGU |
| 2257 | GGCAAGCACUUCCGGGUAG | 7011 | CUACCCGGAAGUGCUUGCC |
| 2258 | GCAAGCACUUCCGGGUAGA | 7012 | UCUACCCGGAAGUGCUUGC |
| 2259 | CAAGCACUUCCGGGUAGAC | 7013 | GUCUACCCGGAAGUGCUUG |
| 2263 | CACUUCCGGGUAGACGGCA | 7017 | UGCCGUCUACCCGGAAGUG |
| 2264 | ACUUCCGGGUAGACGGCAC | 7018 | GUGCCGUCUACCCGGAAGU |
| 2265 | CUUCCGGGUAGACGGCACC | 7019 | GGUGCCGUCUACCCGGAAG |
| 2266 | UUCCGGGUAGACGGCACCU | 7020 | AGGUGCCGUCUACCCGGAA |
| 2267 | UCCGGGUAGACGGCACCUC | 7021 | GAGGUGCCGUCUACCCGGA |
| 2269 | CGGGUAGACGGCACCUCCG | 7023 | CGGAGGUGCCGUCUACCCG |
| 2318 | UGCUGAUAGCAGUGCAACC | 7072 | GGUUGCACUGCUAUCAGCA |
| 2319 | GCUGAUAGCAGUGCAACCC | 7073 | GGGUUGCACUGCUAUCAGC |
| 2320 | CUGAUAGCAGUGCAACCCC | 7074 | GGGGUUGCACUGCUAUCAG |
| 2322 | GAUAGCAGUGCAACCCCUC | 7076 | GAGGGGUUGCACUGCUAUC |
| 2332 | CAACCCCUCUUUGGCCCAC | 7086 | GUGGGCCAAAGAGGGGUUG |
| 2366 | GUCUCACUCUUGAAGGCCA | 7120 | UGGCCUUCAAGAGUGAGAC |
| 2369 | UCACUCUUGAAGGCCAGAG | 7123 | CUCUGGCCUUCAAGAGUGA |
| 2386 | AGUCUGUCUGUAGGCACCA | 7140 | UGGUGCCUACAGACAGACU |
| 2413 | GUGCUGGUCAAUGGGACUG | 7167 | CAGUCCCAUUGACCAGCAC |
| 2418 | GGUCAAUGGGACUGAGUGU | 7172 | ACACUCAGUCCCAUUGACC |
| 2420 | UCAAUGGGACUGAGUGUCU | 7174 | AGACACUCAGUCCCAUUGA |
| 2421 | CAAUGGGACUGAGUGUCUG | 7175 | CAGACACUCAGUCCCAUUG |
| 2422 | AAUGGGACUGAGUGUCUGC | 7176 | GCAGACACUCAGUCCCAUU |
| 2425 | GGGACUGAGUGUCUGCUAG | 7179 | CUAGCAGACACUCAGUCCC |
| 2427 | GACUGAGUGUCUGCUAGCA | 7181 | UGCUAGCAGACACUCAGUC |
| 2430 | UGAGUGUCUGCUAGCACGG | 7184 | CCGUGCUAGCAGACACUCA |
| 2432 | AGUGUCUGCUAGCACGGGU | 7186 | ACCCGUGCUAGCAGACACU |
| 2435 | GUCUGCUAGCACGGGUCAG | 7189 | CUGACCCGUGCUAGCAGAC |
| 2437 | CUGCUAGCACGGGUCAGUG | 7191 | CACUGACCCGUGCUAGCAG |
| 2438 | UGCUAGCACGGGUCAGUGA | 7192 | UCACUGACCCGUGCUAGCA |
| 2440 | CUAGCACGGGUCAGUGAGG | 7194 | CCUCACUGACCCGUGCUAG |
| 2443 | GCACGGGUCAGUGAGGGGC | 7197 | GCCCCUCACUGACCCGUGC |
| 2445 | ACGGGUCAGUGAGGGGCAG | 7199 | CUGCCCCUCACUGACCCGU |
| 2455 | GAGGGGCAGCUUUUAUGUG | 7209 | CACAUAAAAGCUGCCCCUC |
| 2460 | GCAGCUUUUAUGUGCCACA | 7214 | UGUGGCACAUAAAAGCUGC |
| 2462 | AGCUUUUAUGUGCCACACC | 7216 | GGUGUGGCACAUAAAAGCU |
| 2566 | GAAGACCCUGUCGUGCUAA | 7320 | UUAGCACGACAGGGUCUUC |
| 2567 | AAGACCCUGUCGUGCUAAG | 7321 | CUUAGCACGACAGGGUCUU |
| 2571 | CCCUGUCGUGCUAAGCAUC | 7325 | GAUGCUUAGCACGACAGGG |
| 2572 | CCUGUCGUGCUAAGCAUCA | 7326 | UGAUGCUUAGCACGACAGG |
| 2575 | GUCGUGCUAAGCAUCAGCC | 7329 | GGCUGAUGCUUAGCACGAC |
| 2577 | CGUGCUAAGCAUCAGCCCC | 7331 | GGGGCUGAUGCUUAGCACG |
| 2581 | CUAAGCAUCAGCCCCAACU | 7335 | AGUUGGGGCUGAUGCUUAG |
| 2582 | UAAGCAUCAGCCCCAACUG | 7336 | CAGUUGGGGCUGAUGCUUA |
| 2628 | CUGUGGCCAGCAUCUAACU | 7382 | AGUUAGAUGCUGGCCACAG |
| 2629 | UGUGGCCAGCAUCUAACUU | 7383 | AAGUUAGAUGCUGGCCACA |
| 2644 | ACUUCAGCAUGGCACUUAG | 7398 | CUAAGUGCCAUGCUGAAGU |
| 2646 | UUCAGCAUGGCACUUAGUG | 7400 | CACUAAGUGCCAUGCUGAA |
| 2648 | CAGCAUGGCACUUAGUGCU | 7402 | AGCACUAAGUGCCAUGCUG |
| 2652 | AUGGCACUUAGUGCUGUCA | 7406 | UGACAGCACUAAGUGCCAU |
| 2655 | GCACUUAGUGCUGUCAUUC | 7409 | GAAUGACAGCACUAAGUGC |
| 2656 | CACUUAGUGCUGUCAUUCC | 7410 | GGAAUGACAGCACUAAGUG |
| 2661 | AGUGCUGUCAUUCCAUGAC | 7415 | GUCAUGGAAUGACAGCACU |
| 2663 | UGCUGUCAUUCCAUGACGG | 7417 | CCGUCAUGGAAUGACAGCA |
| 2664 | GCUGUCAUUCCAUGACGGG | 7418 | CCCGUCAUGGAAUGACAGC |
| 2666 | UGUCAUUCCAUGACGGGCU | 7420 | AGCCCGUCAUGGAAUGACA |
| 2668 | UCAUUCCAUGACGGGCUUA | 7422 | UAAGCCCGUCAUGGAAUGA |
| 2669 | CAUUCCAUGACGGGCUUAG | 7423 | CUAAGCCCGUCAUGGAAUG |
| 2670 | AUUCCAUGACGGGCUUAGG | 7424 | CCUAAGCCCGUCAUGGAAU |
| 2671 | UUCCAUGACGGGCUUAGGG | 7425 | CCCUAAGCCCGUCAUGGAA |
| 2673 | CCAUGACGGGCUUAGGGCA | 7427 | UGCCCUAAGCCCGUCAUGG |
| 2676 | UGACGGGCUUAGGGCAGUG | 7430 | CACUGCCCUAAGCCCGUCA |
| 2678 | ACGGGCUUAGGGCAGUGGA | 7432 | UCCACUGCCCUAAGCCCGU |
| 2891 | AGGAGCAUGCCAUUAAGUU | 7645 | AACUUAAUGGCAUGCUCCU |
| 3084 | UAUCCUGGGUAGAGUGGUG | 7838 | CACCACUCUACCCAGGAUA |
| 3186 | UGCACUGGUCUUCAGCUAC | 7940 | GUAGCUGAAGACCAGUGCA |
| 3191 | UGGUCUUCAGCUACUGGUG | 7945 | CACCAGUAGCUGAAGACCA |
| 3192 | GGUCUUCAGCUACUGGUGG | 7946 | CCACCAGUAGCUGAAGACC |
| 3223 | CUAGUUCUUCCUCCCAACC | 7977 | GGUUGGGAGGAAGAACUAG |
| 3279 | CACACCCCUGCCUAUUCUG | 8033 | CAGAAUAGGCAGGGGUGUG |
| 3297 | GUACUCGGGCUCUGACUAC | 8051 | GUAGUCAGAGCCCGAGUAC |
| 3298 | UACUCGGGCUCUGACUACA | 8052 | UGUAGUCAGAGCCCGAGUA |
| 3299 | ACUCGGGCUCUGACUACAG | 8053 | CUGUAGUCAGAGCCCGAGU |
| 3300 | CUCGGGCUCUGACUACAGA | 8054 | UCUGUAGUCAGAGCCCGAG |
| 3301 | UCGGGCUCUGACUACAGAA | 8055 | UUCUGUAGUCAGAGCCCGA |
| 3560 | GAGAAUACAUAGACCAGGC | 8314 | GCCUGGUCUAUGUAUUCUC |
| 3563 | AAUACAUAGACCAGGCCCA | 8317 | UGGGCCUGGUCUAUGUAUU |
| 3564 | AUACAUAGACCAGGCCCAG | 8318 | CUGGGCCUGGUCUAUGUAU |
| 3568 | AUAGACCAGGCCCAGAAUC | 8322 | GAUUCUGGGCCUGGUCUAU |
| 3570 | AGACCAGGCCCAGAAUCGA | 8324 | UCGAUUCUGGGCCUGGUCU |
| 3574 | CAGGCCCAGAAUCGAAUCC | 8328 | GGAUUCGAUUCUGGGCCUG |
| 3576 | GGCCCAGAAUCGAAUCCAA | 8330 | UUGGAUUCGAUUCUGGGCC |
| 3577 | GCCCAGAAUCGAAUCCAAU | 8331 | AUUGGAUUCGAUUCUGGGC |
| 3578 | CCCAGAAUCGAAUCCAAUG | 8332 | CAUUGGAUUCGAUUCUGGG |
| 3580 | CAGAAUCGAAUCCAAUGUG | 8334 | CACAUUGGAUUCGAUUCUG |
| 3581 | AGAAUCGAAUCCAAUGUGC | 8335 | GCACAUUGGAUUCGAUUCU |
| 3582 | GAAUCGAAUCCAAUGUGCC | 8336 | GGCACAUUGGAUUCGAUUC |
| 3583 | AAUCGAAUCCAAUGUGCCA | 8337 | UGGCACAUUGGAUUCGAUU |
| 3584 | AUCGAAUCCAAUGUGCCAU | 8338 | AUGGCACAUUGGAUUCGAU |
| 3586 | CGAAUCCAAUGUGCCAUCA | 8340 | UGAUGGCACAUUGGAUUCG |
| 3587 | GAAUCCAAUGUGCCAUCAA | 8341 | UUGAUGGCACAUUGGAUUC |
| 3588 | AAUCCAAUGUGCCAUCAAG | 8342 | CUUGAUGGCACAUUGGAUU |
| 3592 | CAAUGUGCCAUCAAGUCAC | 8346 | GUGACUUGAUGGCACAUUG |
| 3594 | AUGUGCCAUCAAGUCACUA | 8348 | UAGUGACUUGAUGGCACAU |
| 3595 | UGUGCCAUCAAGUCACUAA | 8349 | UUAGUGACUUGAUGGCACA |
| 3596 | GUGCCAUCAAGUCACUAAG | 8350 | CUUAGUGACUUGAUGGCAC |
| 3597 | UGCCAUCAAGUCACUAAGU | 8351 | ACUUAGUGACUUGAUGGCA |
| 3600 | CAUCAAGUCACUAAGUCGC | 8354 | GCGACUUAGUGACUUGAUG |
| 3655 | GAGGGGCUGCUCAUGCGUG | 8409 | CACGCAUGAGCAGCCCCUC |
| 3656 | AGGGGCUGCUCAUGCGUGG | 8410 | CCACGCAUGAGCAGCCCCU |
| 3657 | GGGGCUGCUCAUGCGUGGC | 8411 | GCCACGCAUGAGCAGCCCC |
| 3659 | GGCUGCUCAUGCGUGGCCU | 8413 | AGGCCACGCAUGAGCAGCC |
| 3666 | CAUGCGUGGCCUGAACCAC | 8420 | GUGGUUCAGGCCACGCAUG |
| 3671 | GUGGCCUGAACCACCCGAA | 8425 | UUCGGGUGGUUCAGGCCAC |
| 3672 | UGGCCUGAACCACCCGAAU | 8426 | AUUCGGGUGGUUCAGGCCA |
| 3673 | GGCCUGAACCACCCGAAUG | 8427 | CAUUCGGGUGGUUCAGGCC |
| 3674 | GCCUGAACCACCCGAAUGU | 8428 | ACAUUCGGGUGGUUCAGGC |
| 3676 | CUGAACCACCCGAAUGUGC | 8430 | GCACAUUCGGGUGGUUCAG |
| 3685 | CCGAAUGUGCUGGCUCUCA | 8439 | UGAGAGCCAGCACAUUCGG |
| 3701 | UCAUUGGUAUCAUGUUGCC | 8455 | GGCAACAUGAUACCAAUGA |
| 3702 | CAUUGGUAUCAUGUUGCCA | 8456 | UGGCAACAUGAUACCAAUG |
| 3705 | UGGUAUCAUGUUGCCACCU | 8459 | AGGUGGCAACAUGAUACCA |
| 3746 | UGCCCUAUAUGUGCCACGG | 8500 | CCGUGGCACAUAUAGGGCA |
| 3748 | CCCUAUAUGUGCCACGGUG | 8502 | CACCGUGGCACAUAUAGGG |
| 3749 | CCUAUAUGUGCCACGGUGA | 8503 | UCACCGUGGCACAUAUAGG |
| 3750 | CUAUAUGUGCCACGGUGAC | 8504 | GUCACCGUGGCACAUAUAG |
| 3751 | UAUAUGUGCCACGGUGACC | 8505 | GGUCACCGUGGCACAUAUA |
| 3752 | AUAUGUGCCACGGUGACCU | 8506 | AGGUCACCGUGGCACAUAU |
| 3755 | UGUGCCACGGUGACCUGCU | 8509 | AGCAGGUCACCGUGGCACA |
| 3762 | CGGUGACCUGCUCCAGUUC | 8516 | GAACUGGAGCAGGUCACCG |
| 3770 | UGCUCCAGUUCAUCCGCUC | 8524 | GAGCGGAUGAACUGGAGCA |
| 3771 | GCUCCAGUUCAUCCGCUCA | 8525 | UGAGCGGAUGAACUGGAGC |
| 3773 | UCCAGUUCAUCCGCUCACC | 8527 | GGUGAGCGGAUGAACUGGA |
| 3775 | CAGUUCAUCCGCUCACCUC | 8529 | GAGGUGAGCGGAUGAACUG |
| 3777 | GUUCAUCCGCUCACCUCAG | 8531 | CUGAGGUGAGCGGAUGAAC |
| 3783 | CCGCUCACCUCAGCGGAAC | 8537 | GUUCCGCUGAGGUGAGCGG |
| 3788 | CACCUCAGCGGAACCCCAC | 8542 | GUGGGGUUCCGCUGAGGUG |
| 3791 | CUCAGCGGAACCCCACCGU | 8545 | ACGGUGGGGUUCCGCUGAG |
| 3793 | CAGCGGAACCCCACCGUGA | 8547 | UCACGGUGGGGUUCCGCUG |
| 3794 | AGCGGAACCCCACCGUGAA | 8548 | UUCACGGUGGGGUUCCGCU |
| 3795 | GCGGAACCCCACCGUGAAG | 8549 | CUUCACGGUGGGGUUCCGC |
| 3798 | GAACCCCACCGUGAAGGAC | 8552 | GUCCUUCACGGUGGGGUUC |
| 3799 | AACCCCACCGUGAAGGACC | 8553 | GGUCCUUCACGGUGGGGUU |
| 3800 | ACCCCACCGUGAAGGACCU | 8554 | AGGUCCUUCACGGUGGGGU |
| 3871 | AAGUUUGUGCACAGGGACC | 8625 | GGUCCCUGUGCACAAACUU |
| 4284 | GGUGGAGCAGAUAGUGUCU | 9038 | AGACACUAUCUGCUCCACC |
| 4292 | AGAUAGUGUCUGCACUGCU | 9046 | AGCAGUGCAGACACUAUCU |
| 4308 | GCUUGGGGACCAUUAUGUG | 9062 | CACAUAAUGGUCCCCAAGC |
| 4311 | UGGGGACCAUUAUGUGCAG | 9065 | CUGCACAUAAUGGUCCCCA |
| 4313 | GGGACCAUUAUGUGCAGCU | 9067 | AGCUGCACAUAAUGGUCCC |
| 4333 | CCAGCAACCUACAUGAACU | 9087 | AGUUCAUGUAGGUUGCUGG |

[0244] The siRNAs in subset B have the following characteristics:
[0245] Cross-reactivity: With 19mer in human MST1R mRNA, with 17mer/19mer in NHP MST1R
[0246] Specificity category: For human and NHP: AS2 or better, SS3 or better
[0247] miRNA seeds: AS+SS strand: seed region not conserved in human, mouse, and rat and not present in >4 species
[0248] Off-target frequency: ≤15 human off-targets matched with 2 mismatches in antisense strand
[0249] SNPs: siRNA target sites do not harbor SNPs with a MAF ≥1% (pos. 2-18)

[0250] The siRNA sequences in subset B were further selected for absence of seed regions in the AS strand that are identical to a seed region of known human miRNA to yield subset C. Subset C includes 184 siRNAs whose base sequences are shown in Table 5.

TABLE 5
Sequences in siRNA subset C

| SEQ ID | sense strand sequence | SEQ ID | antisense strand sequence |
|---|---|---|---|
| NO: | (5′-3′) | NO: | (5′-3′) |
| 471 | UGUGUUUGUAGCCAUACGC | 5225 | GCGUAUGGCUACAAACACA |
| 472 | GUGUUUGUAGCCAUACGCA | 5226 | UGCGUAUGGCUACAAACAC |
| 473 | UGUUUGUAGCCAUACGCAA | 5227 | UUGCGUAUGGCUACAAACA |
| 474 | GUUUGUAGCCAUACGCAAU | 5228 | AUUGCGUAUGGCUACAAAC |
| 475 | UUUGUAGCCAUACGCAAUC | 5229 | GAUUGCGUAUGGCUACAAA |
| 476 | UUGUAGCCAUACGCAAUCG | 5230 | CGAUUGCGUAUGGCUACAA |
| 477 | UGUAGCCAUACGCAAUCGC | 5231 | GCGAUUGCGUAUGGCUACA |
| 478 | GUAGCCAUACGCAAUCGCC | 5232 | GGCGAUUGCGUAUGGCUAC |
| 480 | AGCCAUACGCAAUCGCCUG | 5234 | CAGGCGAUUGCGUAUGGCU |
| 482 | CCAUACGCAAUCGCCUGCA | 5236 | UGCAGGCGAUUGCGUAUGG |
| 562 | GGCUGCCAGACGUGUGCAG | 5316 | CUGCACACGUCUGGCAGCC |
| 564 | CUGCCAGACGUGUGCAGCC | 5318 | GGCUGCACACGUCUGGCAG |
| 691 | UGCUUCCUGCAUGACCUAG | 5445 | CUAGGUCAUGCAGGAAGCA |
| 692 | GCUUCCUGCAUGACCUAGA | 5446 | UCUAGGUCAUGCAGGAAGC |
| 693 | CUUCCUGCAUGACCUAGAG | 5447 | CUCUAGGUCAUGCAGGAAG |
| 717 | AGGGACAGCCGUGCAUCUG | 5471 | CAGAUGCACGGCUGUCCCU |
| 724 | GCCGUGCAUCUGGCAGCGC | 5478 | GCGCUGCCAGAUGCACGGC |
| 725 | CCGUGCAUCUGGCAGCGCC | 5479 | GGCGCUGCCAGAUGCACGG |
| 726 | CGUGCAUCUGGCAGCGCCA | 5480 | UGGCGCUGCCAGAUGCACG |
| 753 | CUUCUCAGCCCACCAUAAC | 5507 | GUUAUGGUGGGCUGAGAAG |
| 763 | CACCAUAACCGGCCCGAUG | 5517 | CAUCGGGCCGGUUAUGGUG |
| 764 | ACCAUAACCGGCCCGAUGA | 5518 | UCAUCGGGCCGGUUAUGGU |
| 765 | CCAUAACCGGCCCGAUGAC | 5519 | GUCAUCGGGCCGGUUAUGG |
| 766 | CAUAACCGGCCCGAUGACU | 5520 | AGUCAUCGGGCCGGUUAUG |
| 767 | AUAACCGGCCCGAUGACUG | 5521 | CAGUCAUCGGGCCGGUUAU |
| 775 | CCCGAUGACUGCCCCGACU | 5529 | AGUCGGGGCAGUCAUCGGG |
| 776 | CCGAUGACUGCCCCGACUG | 5530 | CAGUCGGGGCAGUCAUCGG |
| 777 | CGAUGACUGCCCCGACUGU | 5531 | ACAGUCGGGGCAGUCAUCG |
| 801 | CAGCCCAUUGGGCACCCGU | 5555 | ACGGGUGCCCAAUGGGCUG |
| 842 | AGGCCUCCUAUUUCUACGU | 5596 | ACGUAGAAAUAGGAGGCCU |
| 845 | CCUCCUAUUUCUACGUGGC | 5599 | GCCACGUAGAAAUAGGAGG |
| 895 | UUCAGCCCACGCUCAGUGU | 5649 | ACACUGAGCGUGGGCUGAA |
| 898 | AGCCCACGCUCAGUGUCUA | 5652 | UAGACACUGAGCGUGGGCU |
| 899 | GCCCACGCUCAGUGUCUAU | 5653 | AUAGACACUGAGCGUGGGC |
| 900 | CCCACGCUCAGUGUCUAUC | 5654 | GAUAGACACUGAGCGUGGG |
| 901 | CCACGCUCAGUGUCUAUCA | 5655 | UGAUAGACACUGAGCGUGG |
| 903 | ACGCUCAGUGUCUAUCAGG | 5657 | CCUGAUAGACACUGAGCGU |
| 904 | CGCUCAGUGUCUAUCAGGC | 5658 | GCCUGAUAGACACUGAGCG |
| 907 | UCAGUGUCUAUCAGGCGUC | 5661 | GACGCCUGAUAGACACUGA |
| 909 | AGUGUCUAUCAGGCGUCUC | 5663 | GAGACGCCUGAUAGACACU |
| 910 | GUGUCUAUCAGGCGUCUCA | 5664 | UGAGACGCCUGAUAGACAC |
| 912 | GUCUAUCAGGCGUCUCAAG | 5666 | CUUGAGACGCCUGAUAGAC |
| 913 | UCUAUCAGGCGUCUCAAGG | 5667 | CCUUGAGACGCCUGAUAGA |
| 966 | GUUGUCAGUGCUGCCCAAG | 5720 | CUUGGGCAGCACUGACAAC |
| 976 | CUGCCCAAGCAUCUUGUCU | 5730 | AGACAAGAUGCUUGGGCAG |
| 977 | UGCCCAAGCAUCUUGUCUC | 5731 | GAGACAAGAUGCUUGGGCA |
| 1001 | GUAUUGAAUACGUGCACAG | 5755 | CUGUGCACGUAUUCAAUAC |
| 1003 | AUUGAAUACGUGCACAGCU | 5757 | AGCUGUGCACGUAUUCAAU |
| 1004 | UUGAAUACGUGCACAGCUU | 5758 | AAGCUGUGCACGUAUUCAA |
| 1046 | UCCUGACUGUACAGCCGGC | 5800 | GCCGGCUGUACAGUCAGGA |
| 1049 | UGACUGUACAGCCGGCCAG | 5803 | CUGGCCGGCUGUACAGUCA |
| 1053 | UGUACAGCCGGCCAGCGUG | 5807 | CACGCUGGCCGGCUGUACA |
| 1054 | GUACAGCCGGCCAGCGUGA | 5808 | UCACGCUGGCCGGCUGUAC |
| 1055 | UACAGCCGGCCAGCGUGAC | 5809 | GUCACGCUGGCCGGCUGUA |
| 1129 | GAGUUGGGUGACUAUCGGG | 5883 | CCCGAUAGUCACCCAACUC |
| 1130 | AGUUGGGUGACUAUCGGGA | 5884 | UCCCGAUAGUCACCCAACU |
| 1131 | GUUGGGUGACUAUCGGGAG | 5885 | CUCCCGAUAGUCACCCAAC |
| 1132 | UUGGGUGACUAUCGGGAGC | 5886 | GCUCCCGAUAGUCACCCAA |
| 1134 | GGGUGACUAUCGGGAGCUG | 5888 | CAGCUCCCGAUAGUCACCC |
| 1138 | GACUAUCGGGAGCUGGUCC | 5892 | GGACCAGCUCCCGAUAGUC |
| 1146 | GGAGCUGGUCCUCGACUGC | 5900 | GCAGUCGAGGACCAGCUCC |
| 1147 | GAGCUGGUCCUCGACUGCA | 5901 | UGCAGUCGAGGACCAGCUC |
| 1152 | GGUCCUCGACUGCAGAUUU | 5906 | AAAUCUGCAGUCGAGGACC |
| 1153 | GUCCUCGACUGCAGAUUUG | 5907 | CAAAUCUGCAGUCGAGGAC |
| 1155 | CCUCGACUGCAGAUUUGCU | 5909 | AGCAAAUCUGCAGUCGAGG |
| 1157 | UCGACUGCAGAUUUGCUCC | 5911 | GGAGCAAAUCUGCAGUCGA |
| 1162 | UGCAGAUUUGCUCCAAAAC | 5916 | GUUUUGGAGCAAAUCUGCA |
| 1164 | CAGAUUUGCUCCAAAACGC | 5918 | GCGUUUUGGAGCAAAUCUG |
| 1166 | GAUUUGCUCCAAAACGCAG | 5920 | CUGCGUUUUGGAGCAAAUC |
| 1173 | UCCAAAACGCAGGCGCCGG | 5927 | CCGGCGCCUGCGUUUUGGA |
| 1350 | CAACUCUGUCGUCUGUGCC | 6104 | GGCACAGACGACAGAGUUG |
| 1408 | GUGGAGCGCUGUUGUGAAU | 6162 | AUUCACAACAGCGCUCCAC |
| 1409 | UGGAGCGCUGUUGUGAAUC | 6163 | GAUUCACAACAGCGCUCCA |
| 1443 | CCUCCGGCGAGGCCUCGAC | 6197 | GUCGAGGCCUCGCCGGAGG |
| 1444 | CUCCGGCGAGGCCUCGACU | 6198 | AGUCGAGGCCUCGCCGGAG |
| 1445 | UCCGGCGAGGCCUCGACUU | 6199 | AAGUCGAGGCCUCGCCGGA |
| 1446 | CCGGCGAGGCCUCGACUUC | 6200 | GAAGUCGAGGCCUCGCCGG |
| 1447 | CGGCGAGGCCUCGACUUCU | 6201 | AGAAGUCGAGGCCUCGCCG |
| 1857 | GACCUGUGGGCGUUGCCUA | 6611 | UAGGCAACGCCCACAGGUC |
| 1862 | GUGGGCGUUGCCUAAGGGC | 6616 | GCCCUUAGGCAACGCCCAC |
| 2125 | AAGGACAGCUCAAAACUCA | 6879 | UGAGUUUUGAGCUGUCCUU |
| 2143 | AGACCAGUGCCCCGGAAAG | 6897 | CUUUCCGGGGCACUGGUCU |
| 2151 | GCCCCGGAAAGACUUUGUA | 6905 | UACAAAGUCUUUCCGGGGC |
| 2154 | CCGGAAAGACUUUGUAGAG | 6908 | CUCUACAAAGUCUUUCCGG |
| 2208 | GGCAGUGGGGCCUACCAAC | 6962 | GUUGGUAGGCCCCACUGCC |
| 2226 | CGUCAGCCUCACCGUGACU | 6980 | AGUCACGGUGAGGCUGACG |
| 2228 | UCAGCCUCACCGUGACUAA | 6982 | UUAGUCACGGUGAGGCUGA |
| 2229 | CAGCCUCACCGUGACUAAC | 6983 | GUUAGUCACGGUGAGGCUG |
| 2230 | AGCCUCACCGUGACUAACA | 6984 | UGUUAGUCACGGUGAGGCU |
| 2232 | CCUCACCGUGACUAACAUG | 6986 | CAUGUUAGUCACGGUGAGG |
| 2233 | CUCACCGUGACUAACAUGC | 6987 | GCAUGUUAGUCACGGUGAG |
| 2234 | UCACCGUGACUAACAUGCC | 6988 | GGCAUGUUAGUCACGGUGA |
| 2240 | UGACUAACAUGCCACCGGG | 6994 | CCCGGUGGCAUGUUAGUCA |
| 2242 | ACUAACAUGCCACCGGGCA | 6996 | UGCCCGGUGGCAUGUUAGU |
| 2243 | CUAACAUGCCACCGGGCAA | 6997 | UUGCCCGGUGGCAUGUUAG |
| 2244 | UAACAUGCCACCGGGCAAG | 6998 | CUUGCCCGGUGGCAUGUUA |
| 2245 | AACAUGCCACCGGGCAAGC | 6999 | GCUUGCCCGGUGGCAUGUU |
| 2252 | CACCGGGCAAGCACUUCCG | 7006 | CGGAAGUGCUUGCCCGGUG |
| 2257 | GGCAAGCACUUCCGGGUAG | 7011 | CUACCCGGAAGUGCUUGCC |
| 2258 | GCAAGCACUUCCGGGUAGA | 7012 | UCUACCCGGAAGUGCUUGC |
| 2259 | CAAGCACUUCCGGGUAGAC | 7013 | GUCUACCCGGAAGUGCUUG |
| 2263 | CACUUCCGGGUAGACGGCA | 7017 | UGCCGUCUACCCGGAAGUG |
| 2264 | ACUUCCGGGUAGACGGCAC | 7018 | GUGCCGUCUACCCGGAAGU |
| 2265 | CUUCCGGGUAGACGGCACC | 7019 | GGUGCCGUCUACCCGGAAG |
| 2267 | UCCGGGUAGACGGCACCUC | 7021 | GAGGUGCCGUCUACCCGGA |
| 2366 | GUCUCACUCUUGAAGGCCA | 7120 | UGGCCUUCAAGAGUGAGAC |
| 2369 | UCACUCUUGAAGGCCAGAG | 7123 | CUCUGGCCUUCAAGAGUGA |
| 2418 | GGUCAAUGGGACUGAGUGU | 7172 | ACACUCAGUCCCAUUGACC |
| 2421 | CAAUGGGACUGAGUGUCUG | 7175 | CAGACACUCAGUCCCAUUG |
| 2430 | UGAGUGUCUGCUAGCACGG | 7184 | CCGUGCUAGCAGACACUCA |
| 2432 | AGUGUCUGCUAGCACGGGU | 7186 | ACCCGUGCUAGCAGACACU |
| 2435 | GUCUGCUAGCACGGGUCAG | 7189 | CUGACCCGUGCUAGCAGAC |
| 2438 | UGCUAGCACGGGUCAGUGA | 7192 | UCACUGACCCGUGCUAGCA |
| 2445 | ACGGGUCAGUGAGGGGCAG | 7199 | CUGCCCCUCACUGACCCGU |
| 2455 | GAGGGGCAGCUUUUAUGUG | 7209 | CACAUAAAAGCUGCCCCUC |
| 2571 | CCCUGUCGUGCUAAGCAUC | 7325 | GAUGCUUAGCACGACAGGG |
| 2572 | CCUGUCGUGCUAAGCAUCA | 7326 | UGAUGCUUAGCACGACAGG |
| 2628 | CUGUGGCCAGCAUCUAACU | 7382 | AGUUAGAUGCUGGCCACAG |
| 2629 | UGUGGCCAGCAUCUAACUU | 7383 | AAGUUAGAUGCUGGCCACA |
| 2644 | ACUUCAGCAUGGCACUUAG | 7398 | CUAAGUGCCAUGCUGAAGU |
| 2646 | UUCAGCAUGGCACUUAGUG | 7400 | CACUAAGUGCCAUGCUGAA |
| 2648 | CAGCAUGGCACUUAGUGCU | 7402 | AGCACUAAGUGCCAUGCUG |
| 2655 | GCACUUAGUGCUGUCAUUC | 7409 | GAAUGACAGCACUAAGUGC |
| 2656 | CACUUAGUGCUGUCAUUCC | 7410 | GGAAUGACAGCACUAAGUG |
| 2661 | AGUGCUGUCAUUCCAUGAC | 7415 | GUCAUGGAAUGACAGCACU |
| 2663 | UGCUGUCAUUCCAUGACGG | 7417 | CCGUCAUGGAAUGACAGCA |
| 2664 | GCUGUCAUUCCAUGACGGG | 7418 | CCCGUCAUGGAAUGACAGC |
| 2666 | UGUCAUUCCAUGACGGGCU | 7420 | AGCCCGUCAUGGAAUGACA |
| 2668 | UCAUUCCAUGACGGGCUUA | 7422 | UAAGCCCGUCAUGGAAUGA |
| 2669 | CAUUCCAUGACGGGCUUAG | 7423 | CUAAGCCCGUCAUGGAAUG |
| 2670 | AUUCCAUGACGGGCUUAGG | 7424 | CCUAAGCCCGUCAUGGAAU |
| 2671 | UUCCAUGACGGGCUUAGGG | 7425 | CCCUAAGCCCGUCAUGGAA |
| 2676 | UGACGGGCUUAGGGCAGUG | 7430 | CACUGCCCUAAGCCCGUCA |
| 2891 | AGGAGCAUGCCAUUAAGUU | 7645 | AACUUAAUGGCAUGCUCCU |
| 3186 | UGCACUGGUCUUCAGCUAC | 7940 | GUAGCUGAAGACCAGUGCA |
| 3191 | UGGUCUUCAGCUACUGGUG | 7945 | CACCAGUAGCUGAAGACCA |
| 3279 | CACACCCCUGCCUAUUCUG | 8033 | CAGAAUAGGCAGGGGUGUG |
| 3297 | GUACUCGGGCUCUGACUAC | 8051 | GUAGUCAGAGCCCGAGUAC |
| 3298 | UACUCGGGCUCUGACUACA | 8052 | UGUAGUCAGAGCCCGAGUA |
| 3299 | ACUCGGGCUCUGACUACAG | 8053 | CUGUAGUCAGAGCCCGAGU |
| 3560 | GAGAAUACAUAGACCAGGC | 8314 | GCCUGGUCUAUGUAUUCUC |
| 3570 | AGACCAGGCCCAGAAUCGA | 8324 | UCGAUUCUGGGCCUGGUCU |
| 3574 | CAGGCCCAGAAUCGAAUCC | 8328 | GGAUUCGAUUCUGGGCCUG |
| 3576 | GGCCCAGAAUCGAAUCCAA | 8330 | UUGGAUUCGAUUCUGGGCC |
| 3578 | CCCAGAAUCGAAUCCAAUG | 8332 | CAUUGGAUUCGAUUCUGGG |
| 3580 | CAGAAUCGAAUCCAAUGUG | 8334 | CACAUUGGAUUCGAUUCUG |
| 3581 | AGAAUCGAAUCCAAUGUGC | 8335 | GCACAUUGGAUUCGAUUCU |
| 3583 | AAUCGAAUCCAAUGUGCCA | 8337 | UGGCACAUUGGAUUCGAUU |
| 3584 | AUCGAAUCCAAUGUGCCAU | 8338 | AUGGCACAUUGGAUUCGAU |
| 3586 | CGAAUCCAAUGUGCCAUCA | 8340 | UGAUGGCACAUUGGAUUCG |
| 3588 | AAUCCAAUGUGCCAUCAAG | 8342 | CUUGAUGGCACAUUGGAUU |
| 3592 | CAAUGUGCCAUCAAGUCAC | 8346 | GUGACUUGAUGGCACAUUG |
| 3594 | AUGUGCCAUCAAGUCACUA | 8348 | UAGUGACUUGAUGGCACAU |
| 3597 | UGCCAUCAAGUCACUAAGU | 8351 | ACUUAGUGACUUGAUGGCA |
| 3600 | CAUCAAGUCACUAAGUCGC | 8354 | GCGACUUAGUGACUUGAUG |
| 3655 | GAGGGGCUGCUCAUGCGUG | 8409 | CACGCAUGAGCAGCCCCUC |
| 3656 | AGGGGCUGCUCAUGCGUGG | 8410 | CCACGCAUGAGCAGCCCCU |
| 3657 | GGGGCUGCUCAUGCGUGGC | 8411 | GCCACGCAUGAGCAGCCCC |
| 3659 | GGCUGCUCAUGCGUGGCCU | 8413 | AGGCCACGCAUGAGCAGCC |
| 3671 | GUGGCCUGAACCACCCGAA | 8425 | UUCGGGUGGUUCAGGCCAC |
| 3672 | UGGCCUGAACCACCCGAAU | 8426 | AUUCGGGUGGUUCAGGCCA |
| 3673 | GGCCUGAACCACCCGAAUG | 8427 | CAUUCGGGUGGUUCAGGCC |
| 3674 | GCCUGAACCACCCGAAUGU | 8428 | ACAUUCGGGUGGUUCAGGC |
| 3676 | CUGAACCACCCGAAUGUGC | 8430 | GCACAUUCGGGUGGUUCAG |
| 3685 | CCGAAUGUGCUGGCUCUCA | 8439 | UGAGAGCCAGCACAUUCGG |
| 3701 | UCAUUGGUAUCAUGUUGCC | 8455 | GGCAACAUGAUACCAAUGA |
| 3705 | UGGUAUCAUGUUGCCACCU | 8459 | AGGUGGCAACAUGAUACCA |
| 3748 | CCCUAUAUGUGCCACGGUG | 8502 | CACCGUGGCACAUAUAGGG |
| 3749 | CCUAUAUGUGCCACGGUGA | 8503 | UCACCGUGGCACAUAUAGG |
| 3750 | CUAUAUGUGCCACGGUGAC | 8504 | GUCACCGUGGCACAUAUAG |
| 3752 | AUAUGUGCCACGGUGACCU | 8506 | AGGUCACCGUGGCACAUAU |
| 3771 | GCUCCAGUUCAUCCGCUCA | 8525 | UGAGCGGAUGAACUGGAGC |
| 3773 | UCCAGUUCAUCCGCUCACC | 8527 | GGUGAGCGGAUGAACUGGA |
| 3775 | CAGUUCAUCCGCUCACCUC | 8529 | GAGGUGAGCGGAUGAACUG |
| 3777 | GUUCAUCCGCUCACCUCAG | 8531 | CUGAGGUGAGCGGAUGAAC |
| 3793 | CAGCGGAACCCCACCGUGA | 8547 | UCACGGUGGGGUUCCGCUG |
| 3794 | AGCGGAACCCCACCGUGAA | 8548 | UUCACGGUGGGGUUCCGCU |
| 3795 | GCGGAACCCCACCGUGAAG | 8549 | CUUCACGGUGGGGUUCCGC |
| 3799 | AACCCCACCGUGAAGGACC | 8553 | GGUCCUUCACGGUGGGGUU |
| 3800 | ACCCCACCGUGAAGGACCU | 8554 | AGGUCCUUCACGGUGGGGU |
| 3871 | AAGUUUGUGCACAGGGACC | 8625 | GGUCCCUGUGCACAAACUU |
| 4308 | GCUUGGGGACCAUUAUGUG | 9062 | CACAUAAUGGUCCCCAAGC |
| 4311 | UGGGGACCAUUAUGUGCAG | 9065 | CUGCACAUAAUGGUCCCCA |
| 4313 | GGGACCAUUAUGUGCAGCU | 9067 | AGCUGCACAUAAUGGUCCC |

[0251] The siRNAs in subset C have the following characteristics:
[0252] Cross-reactivity: With 19mer in human MST1R mRNA, with 17mer/19mer in NHP MST1R
[0253] Specificity category: For human and NHP: AS2 or better, SS3 or better
[0254] miRNA seeds: AS+SS strand: seed region not conserved in human, mouse, and rat and not present in >4 species. AS strand: seed region not identical to seed region of known human miRNA
[0255] Off-target frequency: ≤15 human off-targets matched with 2 mismatches by antisense strand
[0256] SNPs: siRNA target sites do not harbor SNPs with a MAF ≥1% (pos. 2-18)

[0257] The siRNA sequences in subset C were also selected for absence of seed regions in the AS or S strands that are identical to a seed region of known human miRNA to yield subset D. Subset D includes 121 siRNAs whose base sequences are shown in Table 6.

TABLE 6
Sequences in siRNA subset D

| SEQ ID | sense strand sequence | SEQ ID | antisense strand sequence |
|---|---|---|---|
| NO: | (5′-3′) | NO : | (5′-3′) |
| 471 | UGUGUUUGUAGCCAUACGC | 5225 | GCGUAUGGCUACAAACACA |
| 472 | GUGUUUGUAGCCAUACGCA | 5226 | UGCGUAUGGCUACAAACAC |
| 474 | GUUUGUAGCCAUACGCAAU | 5228 | AUUGCGUAUGGCUACAAAC |
| 476 | UUGUAGCCAUACGCAAUCG | 5230 | CGAUUGCGUAUGGCUACAA |
| 477 | UGUAGCCAUACGCAAUCGC | 5231 | GCGAUUGCGUAUGGCUACA |
| 480 | AGCCAUACGCAAUCGCCUG | 5234 | CAGGCGAUUGCGUAUGGCU |
| 482 | CCAUACGCAAUCGCCUGCA | 5236 | UGCAGGCGAUUGCGUAUGG |
| 692 | GCUUCCUGCAUGACCUAGA | 5446 | UCUAGGUCAUGCAGGAAGC |
| 717 | AGGGACAGCCGUGCAUCUG | 5471 | CAGAUGCACGGCUGUCCCU |
| 726 | CGUGCAUCUGGCAGCGCCA | 5480 | UGGCGCUGCCAGAUGCACG |
| 753 | CUUCUCAGCCCACCAUAAC | 5507 | GUUAUGGUGGGCUGAGAAG |
| 763 | CACCAUAACCGGCCCGAUG | 5517 | CAUCGGGCCGGUUAUGGUG |
| 764 | ACCAUAACCGGCCCGAUGA | 5518 | UCAUCGGGCCGGUUAUGGU |
| 765 | CCAUAACCGGCCCGAUGAC | 5519 | GUCAUCGGGCCGGUUAUGG |
| 766 | CAUAACCGGCCCGAUGACU | 5520 | AGUCAUCGGGCCGGUUAUG |
| 767 | AUAACCGGCCCGAUGACUG | 5521 | CAGUCAUCGGGCCGGUUAU |
| 775 | CCCGAUGACUGCCCCGACU | 5529 | AGUCGGGGCAGUCAUCGGG |
| 776 | CCGAUGACUGCCCCGACUG | 5530 | CAGUCGGGGCAGUCAUCGG |
| 777 | CGAUGACUGCCCCGACUGU | 5531 | ACAGUCGGGGCAGUCAUCG |
| 801 | CAGCCCAUUGGGCACCCGU | 5555 | ACGGGUGCCCAAUGGGCUG |
| 824 | CUGUGGUUGAGCAAGGCCA | 5578 | UGGCCUUGCUCAACCACAG |
| 845 | CCUCCUAUUUCUACGUGGC | 5599 | GCCACGUAGAAAUAGGAGG |
| 864 | AUCCUCACUGGACGCAGCC | 5618 | GGCUGCGUCCAGUGAGGAU |
| 898 | AGCCCACGCUCAGUGUCUA | 5652 | UAGACACUGAGCGUGGGCU |
| 900 | CCCACGCUCAGUGUCUAUC | 5654 | GAUAGACACUGAGCGUGGG |
| 901 | CCACGCUCAGUGUCUAUCA | 5655 | UGAUAGACACUGAGCGUGG |
| 903 | ACGCUCAGUGUCUAUCAGG | 5657 | CCUGAUAGACACUGAGCGU |
| 910 | GUGUCUAUCAGGCGUCUCA | 5664 | UGAGACGCCUGAUAGACAC |
| 912 | GUCUAUCAGGCGUCUCAAG | 5666 | CUUGAGACGCCUGAUAGAC |
| 913 | UCUAUCAGGCGUCUCAAGG | 5667 | CCUUGAGACGCCUGAUAGA |
| 948 | CGCACCGGGCUUUGUGGCG | 5702 | CGCCACAAAGCCCGGUGCG |
| 966 | GUUGUCAGUGCUGCCCAAG | 5720 | CUUGGGCAGCACUGACAAC |
| 976 | CUGCCCAAGCAUCUUGUCU | 5730 | AGACAAGAUGCUUGGGCAG |
| 977 | UGCCCAAGCAUCUUGUCUC | 5731 | GAGACAAGAUGCUUGGGCA |
| 990 | UGUCUCCUACAGUAUUGAA | 5744 | UUCAAUACUGUAGGAGACA |
| 1001 | GUAUUGAAUACGUGCACAG | 5755 | CUGUGCACGUAUUCAAUAC |
| 1003 | AUUGAAUACGUGCACAGCU | 5757 | AGCUGUGCACGUAUUCAAU |
| 1042 | UACUUCCUGACUGUACAGC | 5796 | GCUGUACAGUCAGGAAGUA |
| 1046 | UCCUGACUGUACAGCCGGC | 5800 | GCCGGCUGUACAGUCAGGA |
| 1049 | UGACUGUACAGCCGGCCAG | 5803 | CUGGCCGGCUGUACAGUCA |
| 1053 | UGUACAGCCGGCCAGCGUG | 5807 | CACGCUGGCCGGCUGUACA |
| 1054 | GUACAGCCGGCCAGCGUGA | 5808 | UCACGCUGGCCGGCUGUAC |
| 1124 | AGCCAGAGUUGGGUGACUA | 5878 | UAGUCACCCAACUCUGGCU |
| 1131 | GUUGGGUGACUAUCGGGAG | 5885 | CUCCCGAUAGUCACCCAAC |
| 1134 | GGGUGACUAUCGGGAGCUG | 5888 | CAGCUCCCGAUAGUCACCC |
| 1138 | GACUAUCGGGAGCUGGUCC | 5892 | GGACCAGCUCCCGAUAGUC |
| 1147 | GAGCUGGUCCUCGACUGCA | 5901 | UGCAGUCGAGGACCAGCUC |
| 1153 | GUCCUCGACUGCAGAUUUG | 5907 | CAAAUCUGCAGUCGAGGAC |
| 1155 | CCUCGACUGCAGAUUUGCU | 5909 | AGCAAAUCUGCAGUCGAGG |
| 1157 | UCGACUGCAGAUUUGCUCC | 5911 | GGAGCAAAUCUGCAGUCGA |
| 1162 | UGCAGAUUUGCUCCAAAAC | 5916 | GUUUUGGAGCAAAUCUGCA |
| 1164 | CAGAUUUGCUCCAAAACGC | 5918 | GCGUUUUGGAGCAAAUCUG |
| 1166 | GAUUUGCUCCAAAACGCAG | 5920 | CUGCGUUUUGGAGCAAAUC |
| 1173 | UCCAAAACGCAGGCGCCGG | 5927 | CCGGCGCCUGCGUUUUGGA |
| 1409 | UGGAGCGCUGUUGUGAAUC | 6163 | GAUUCACAACAGCGCUCCA |
| 1443 | CCUCCGGCGAGGCCUCGAC | 6197 | GUCGAGGCCUCGCCGGAGG |
| 1444 | CUCCGGCGAGGCCUCGACU | 6198 | AGUCGAGGCCUCGCCGGAG |
| 1445 | UCCGGCGAGGCCUCGACUU | 6199 | AAGUCGAGGCCUCGCCGGA |
| 1447 | CGGCGAGGCCUCGACUUCU | 6201 | AGAAGUCGAGGCCUCGCCG |
| 1857 | GACCUGUGGGCGUUGCCUA | 6611 | UAGGCAACGCCCACAGGUC |
| 2143 | AGACCAGUGCCCCGGAAAG | 6897 | CUUUCCGGGGCACUGGUCU |
| 2154 | CCGGAAAGACUUUGUAGAG | 6908 | CUCUACAAAGUCUUUCCGG |
| 2226 | CGUCAGCCUCACCGUGACU | 6980 | AGUCACGGUGAGGCUGACG |
| 2228 | UCAGCCUCACCGUGACUAA | 6982 | UUAGUCACGGUGAGGCUGA |
| 2230 | AGCCUCACCGUGACUAACA | 6984 | UGUUAGUCACGGUGAGGCU |
| 2233 | CUCACCGUGACUAACAUGC | 6987 | GCAUGUUAGUCACGGUGAG |
| 2234 | UCACCGUGACUAACAUGCC | 6988 | GGCAUGUUAGUCACGGUGA |
| 2242 | ACUAACAUGCCACCGGGCA | 6996 | UGCCCGGUGGCAUGUUAGU |
| 2244 | UAACAUGCCACCGGGCAAG | 6998 | CUUGCCCGGUGGCAUGUUA |
| 2245 | AACAUGCCACCGGGCAAGC | 6999 | GCUUGCCCGGUGGCAUGUU |
| 2257 | GGCAAGCACUUCCGGGUAG | 7011 | CUACCCGGAAGUGCUUGCC |
| 2258 | GCAAGCACUUCCGGGUAGA | 7012 | UCUACCCGGAAGUGCUUGC |
| 2263 | CACUUCCGGGUAGACGGCA | 7017 | UGCCGUCUACCCGGAAGUG |
| 2264 | ACUUCCGGGUAGACGGCAC | 7018 | GUGCCGUCUACCCGGAAGU |
| 2267 | UCCGGGUAGACGGCACCUC | 7021 | GAGGUGCCGUCUACCCGGA |
| 2418 | GGUCAAUGGGACUGAGUGU | 7172 | ACACUCAGUCCCAUUGACC |
| 2445 | ACGGGUCAGUGAGGGGCAG | 7199 | CUGCCCCUCACUGACCCGU |
| 2572 | CCUGUCGUGCUAAGCAUCA | 7326 | UGAUGCUUAGCACGACAGG |
| 2644 | ACUUCAGCAUGGCACUUAG | 7398 | CUAAGUGCCAUGCUGAAGU |
| 2648 | CAGCAUGGCACUUAGUGCU | 7402 | AGCACUAAGUGCCAUGCUG |
| 2655 | GCACUUAGUGCUGUCAUUC | 7409 | GAAUGACAGCACUAAGUGC |
| 2661 | AGUGCUGUCAUUCCAUGAC | 7415 | GUCAUGGAAUGACAGCACU |
| 2668 | UCAUUCCAUGACGGGCUUA | 7422 | UAAGCCCGUCAUGGAAUGA |
| 2669 | CAUUCCAUGACGGGCUUAG | 7423 | CUAAGCCCGUCAUGGAAUG |
| 2676 | UGACGGGCUUAGGGCAGUG | 7430 | CACUGCCCUAAGCCCGUCA |
| 3186 | UGCACUGGUCUUCAGCUAC | 7940 | GUAGCUGAAGACCAGUGCA |
| 3191 | UGGUCUUCAGCUACUGGUG | 7945 | CACCAGUAGCUGAAGACCA |
| 3279 | CACACCCCUGCCUAUUCUG | 8033 | CAGAAUAGGCAGGGGUGUG |
| 3297 | GUACUCGGGCUCUGACUAC | 8051 | GUAGUCAGAGCCCGAGUAC |
| 3298 | UACUCGGGCUCUGACUACA | 8052 | UGUAGUCAGAGCCCGAGUA |
| 3299 | ACUCGGGCUCUGACUACAG | 8053 | CUGUAGUCAGAGCCCGAGU |
| 3537 | CCACUUUGGAGUUGUCUAC | 8291 | GUAGACAACUCCAAAGUGG |
| 3538 | CACUUUGGAGUUGUCUACC | 8292 | GGUAGACAACUCCAAAGUG |
| 3560 | GAGAAUACAUAGACCAGGC | 8314 | GCCUGGUCUAUGUAUUCUC |
| 3570 | AGACCAGGCCCAGAAUCGA | 8324 | UCGAUUCUGGGCCUGGUCU |
| 3576 | GGCCCAGAAUCGAAUCCAA | 8330 | UUGGAUUCGAUUCUGGGCC |
| 3580 | CAGAAUCGAAUCCAAUGUG | 8334 | CACAUUGGAUUCGAUUCUG |
| 3581 | AGAAUCGAAUCCAAUGUGC | 8335 | GCACAUUGGAUUCGAUUCU |
| 3583 | AAUCGAAUCCAAUGUGCCA | 8337 | UGGCACAUUGGAUUCGAUU |
| 3584 | AUCGAAUCCAAUGUGCCAU | 8338 | AUGGCACAUUGGAUUCGAU |
| 3586 | CGAAUCCAAUGUGCCAUCA | 8340 | UGAUGGCACAUUGGAUUCG |
| 3588 | AAUCCAAUGUGCCAUCAAG | 8342 | CUUGAUGGCACAUUGGAUU |
| 3597 | UGCCAUCAAGUCACUAAGU | 8351 | ACUUAGUGACUUGAUGGCA |
| 3600 | CAUCAAGUCACUAAGUCGC | 8354 | GCGACUUAGUGACUUGAUG |
| 3659 | GGCUGCUCAUGCGUGGCCU | 8413 | AGGCCACGCAUGAGCAGCC |
| 3663 | GCUCAUGCGUGGCCUGAAC | 8417 | GUUCAGGCCACGCAUGAGC |
| 3673 | GGCCUGAACCACCCGAAUG | 8427 | CAUUCGGGUGGUUCAGGCC |
| 3676 | CUGAACCACCCGAAUGUGC | 8430 | GCACAUUCGGGUGGUUCAG |
| 3685 | CCGAAUGUGCUGGCUCUCA | 8439 | UGAGAGCCAGCACAUUCGG |
| 3701 | UCAUUGGUAUCAUGUUGCC | 8455 | GGCAACAUGAUACCAAUGA |
| 3705 | UGGUAUCAUGUUGCCACCU | 8459 | AGGUGGCAACAUGAUACCA |
| 3748 | CCCUAUAUGUGCCACGGUG | 8502 | CACCGUGGCACAUAUAGGG |
| 3749 | CCUAUAUGUGCCACGGUGA | 8503 | UCACCGUGGCACAUAUAGG |
| 3750 | CUAUAUGUGCCACGGUGAC | 8504 | GUCACCGUGGCACAUAUAG |
| 3752 | AUAUGUGCCACGGUGACCU | 8506 | AGGUCACCGUGGCACAUAU |
| 3773 | UCCAGUUCAUCCGCUCACC | 8527 | GGUGAGCGGAUGAACUGGA |
| 3777 | GUUCAUCCGCUCACCUCAG | 8531 | CUGAGGUGAGCGGAUGAAC |
| 3794 | AGCGGAACCCCACCGUGAA | 8548 | UUCACGGUGGGGUUCCGCU |
| 3795 | GCGGAACCCCACCGUGAAG | 8549 | CUUCACGGUGGGGUUCCGC |
| 3799 | AACCCCACCGUGAAGGACC | 8553 | GGUCCUUCACGGUGGGGUU |
| 3871 | AAGUUUGUGCACAGGGACC | 8625 | GGUCCCUGUGCACAAACUU |

[0258] The siRNAs in subset D have the following characteristics:
[0259] Cross-reactivity: With 19mer in human MST1R mRNA, with 17mer/19mer in NHP MST1R
[0260] Specificity category: For human and NHP: AS2 or better, SS3 or better
[0261] miRNA seeds: AS+SS strand: seed region not conserved in human, mouse, and rat and not present in >4 species. AS+SS strand: seed region not identical to seed region of known human miRNA
[0262] Off-target frequency: ≤20 human off-targets matched with 2 mismatches by antisense strand
[0263] SNPs: siRNA target sites do not harbor SNPs with a MAF >1% (pos. 2-18)

[0264] The siRNA sequences in subset D were further selected for more stringent specificity to yield subset E. Subset E includes 112 siRNAs whose base sequences are shown in Table 7.

TABLE 7
Sequences in siRNA subset E

| SEQ ID | sense strand sequence | SEQ ID | antisense strand sequence |
|---|---|---|---|
| NO: | (5′-3′) | NO: | (5′-3′) |
| 471 | UGUGUUUGUAGCCAUACGC | 5225 | GCGUAUGGCUACAAACACA |
| 472 | GUGUUUGUAGCCAUACGCA | 5226 | UGCGUAUGGCUACAAACAC |
| 474 | GUUUGUAGCCAUACGCAAU | 5228 | AUUGCGUAUGGCUACAAAC |
| 476 | UUGUAGCCAUACGCAAUCG | 5230 | CGAUUGCGUAUGGCUACAA |
| 477 | UGUAGCCAUACGCAAUCGC | 5231 | GCGAUUGCGUAUGGCUACA |
| 480 | AGCCAUACGCAAUCGCCUG | 5234 | CAGGCGAUUGCGUAUGGCU |
| 482 | CCAUACGCAAUCGCCUGCA | 5236 | UGCAGGCGAUUGCGUAUGG |
| 692 | GCUUCCUGCAUGACCUAGA | 5446 | UCUAGGUCAUGCAGGAAGC |
| 717 | AGGGACAGCCGUGCAUCUG | 5471 | CAGAUGCACGGCUGUCCCU |
| 726 | CGUGCAUCUGGCAGCGCCA | 5480 | UGGCGCUGCCAGAUGCACG |
| 753 | CUUCUCAGCCCACCAUAAC | 5507 | GUUAUGGUGGGCUGAGAAG |
| 763 | CACCAUAACCGGCCCGAUG | 5517 | CAUCGGGCCGGUUAUGGUG |
| 764 | ACCAUAACCGGCCCGAUGA | 5518 | UCAUCGGGCCGGUUAUGGU |
| 765 | CCAUAACCGGCCCGAUGAC | 5519 | GUCAUCGGGCCGGUUAUGG |
| 766 | CAUAACCGGCCCGAUGACU | 5520 | AGUCAUCGGGCCGGUUAUG |
| 767 | AUAACCGGCCCGAUGACUG | 5521 | CAGUCAUCGGGCCGGUUAU |
| 775 | CCCGAUGACUGCCCCGACU | 5529 | AGUCGGGGCAGUCAUCGGG |
| 776 | CCGAUGACUGCCCCGACUG | 5530 | CAGUCGGGGCAGUCAUCGG |
| 777 | CGAUGACUGCCCCGACUGU | 5531 | ACAGUCGGGGCAGUCAUCG |
| 801 | CAGCCCAUUGGGCACCCGU | 5555 | ACGGGUGCCCAAUGGGCUG |
| 845 | CCUCCUAUUUCUACGUGGC | 5599 | GCCACGUAGAAAUAGGAGG |
| 898 | AGCCCACGCUCAGUGUCUA | 5652 | UAGACACUGAGCGUGGGCU |
| 900 | CCCACGCUCAGUGUCUAUC | 5654 | GAUAGACACUGAGCGUGGG |
| 901 | CCACGCUCAGUGUCUAUCA | 5655 | UGAUAGACACUGAGCGUGG |
| 903 | ACGCUCAGUGUCUAUCAGG | 5657 | CCUGAUAGACACUGAGCGU |
| 910 | GUGUCUAUCAGGCGUCUCA | 5664 | UGAGACGCCUGAUAGACAC |
| 912 | GUCUAUCAGGCGUCUCAAG | 5666 | CUUGAGACGCCUGAUAGAC |
| 913 | UCUAUCAGGCGUCUCAAGG | 5667 | CCUUGAGACGCCUGAUAGA |
| 966 | GUUGUCAGUGCUGCCCAAG | 5720 | CUUGGGCAGCACUGACAAC |
| 976 | CUGCCCAAGCAUCUUGUCU | 5730 | AGACAAGAUGCUUGGGCAG |
| 977 | UGCCCAAGCAUCUUGUCUC | 5731 | GAGACAAGAUGCUUGGGCA |
| 1001 | GUAUUGAAUACGUGCACAG | 5755 | CUGUGCACGUAUUCAAUAC |
| 1003 | AUUGAAUACGUGCACAGCU | 5757 | AGCUGUGCACGUAUUCAAU |
| 1046 | UCCUGACUGUACAGCCGGC | 5800 | GCCGGCUGUACAGUCAGGA |
| 1049 | UGACUGUACAGCCGGCCAG | 5803 | CUGGCCGGCUGUACAGUCA |
| 1053 | UGUACAGCCGGCCAGCGUG | 5807 | CACGCUGGCCGGCUGUACA |
| 1054 | GUACAGCCGGCCAGCGUGA | 5808 | UCACGCUGGCCGGCUGUAC |
| 1131 | GUUGGGUGACUAUCGGGAG | 5885 | CUCCCGAUAGUCACCCAAC |
| 1134 | GGGUGACUAUCGGGAGCUG | 5888 | CAGCUCCCGAUAGUCACCC |
| 1138 | GACUAUCGGGAGCUGGUCC | 5892 | GGACCAGCUCCCGAUAGUC |
| 1147 | GAGCUGGUCCUCGACUGCA | 5901 | UGCAGUCGAGGACCAGCUC |
| 1153 | GUCCUCGACUGCAGAUUUG | 5907 | CAAAUCUGCAGUCGAGGAC |
| 1155 | CCUCGACUGCAGAUUUGCU | 5909 | AGCAAAUCUGCAGUCGAGG |
| 1157 | UCGACUGCAGAUUUGCUCC | 5911 | GGAGCAAAUCUGCAGUCGA |
| 1162 | UGCAGAUUUGCUCCAAAAC | 5916 | GUUUUGGAGCAAAUCUGCA |
| 1164 | CAGAUUUGCUCCAAAACGC | 5918 | GCGUUUUGGAGCAAAUCUG |
| 1166 | GAUUUGCUCCAAAACGCAG | 5920 | CUGCGUUUUGGAGCAAAUC |
| 1173 | UCCAAAACGCAGGCGCCGG | 5927 | CCGGCGCCUGCGUUUUGGA |
| 1409 | UGGAGCGCUGUUGUGAAUC | 6163 | GAUUCACAACAGCGCUCCA |
| 1443 | CCUCCGGCGAGGCCUCGAC | 6197 | GUCGAGGCCUCGCCGGAGG |
| 1444 | CUCCGGCGAGGCCUCGACU | 6198 | AGUCGAGGCCUCGCCGGAG |
| 1445 | UCCGGCGAGGCCUCGACUU | 6199 | AAGUCGAGGCCUCGCCGGA |
| 1447 | CGGCGAGGCCUCGACUUCU | 6201 | AGAAGUCGAGGCCUCGCCG |
| 1857 | GACCUGUGGGCGUUGCCUA | 6611 | UAGGCAACGCCCACAGGUC |
| 2143 | AGACCAGUGCCCCGGAAAG | 6897 | CUUUCCGGGGCACUGGUCU |
| 2154 | CCGGAAAGACUUUGUAGAG | 6908 | CUCUACAAAGUCUUUCCGG |
| 2226 | CGUCAGCCUCACCGUGACU | 6980 | AGUCACGGUGAGGCUGACG |
| 2228 | UCAGCCUCACCGUGACUAA | 6982 | UUAGUCACGGUGAGGCUGA |
| 2230 | AGCCUCACCGUGACUAACA | 6984 | UGUUAGUCACGGUGAGGCU |
| 2233 | CUCACCGUGACUAACAUGC | 6987 | GCAUGUUAGUCACGGUGAG |
| 2234 | UCACCGUGACUAACAUGCC | 6988 | GGCAUGUUAGUCACGGUGA |
| 2242 | ACUAACAUGCCACCGGGCA | 6996 | UGCCCGGUGGCAUGUUAGU |
| 2244 | UAACAUGCCACCGGGCAAG | 6998 | CUUGCCCGGUGGCAUGUUA |
| 2245 | AACAUGCCACCGGGCAAGC | 6999 | GCUUGCCCGGUGGCAUGUU |
| 2257 | GGCAAGCACUUCCGGGUAG | 7011 | CUACCCGGAAGUGCUUGCC |
| 2258 | GCAAGCACUUCCGGGUAGA | 7012 | UCUACCCGGAAGUGCUUGC |
| 2263 | CACUUCCGGGUAGACGGCA | 7017 | UGCCGUCUACCCGGAAGUG |
| 2264 | ACUUCCGGGUAGACGGCAC | 7018 | GUGCCGUCUACCCGGAAGU |
| 2267 | UCCGGGUAGACGGCACCUC | 7021 | GAGGUGCCGUCUACCCGGA |
| 2418 | GGUCAAUGGGACUGAGUGU | 7172 | ACACUCAGUCCCAUUGACC |
| 2445 | ACGGGUCAGUGAGGGGCAG | 7199 | CUGCCCCUCACUGACCCGU |
| 2572 | CCUGUCGUGCUAAGCAUCA | 7326 | UGAUGCUUAGCACGACAGG |
| 2644 | ACUUCAGCAUGGCACUUAG | 7398 | CUAAGUGCCAUGCUGAAGU |
| 2648 | CAGCAUGGCACUUAGUGCU | 7402 | AGCACUAAGUGCCAUGCUG |
| 2655 | GCACUUAGUGCUGUCAUUC | 7409 | GAAUGACAGCACUAAGUGC |
| 2661 | AGUGCUGUCAUUCCAUGAC | 7415 | GUCAUGGAAUGACAGCACU |
| 2668 | UCAUUCCAUGACGGGCUUA | 7422 | UAAGCCCGUCAUGGAAUGA |
| 2669 | CAUUCCAUGACGGGCUUAG | 7423 | CUAAGCCCGUCAUGGAAUG |
| 2676 | UGACGGGCUUAGGGCAGUG | 7430 | CACUGCCCUAAGCCCGUCA |
| 3186 | UGCACUGGUCUUCAGCUAC | 7940 | GUAGCUGAAGACCAGUGCA |
| 3191 | UGGUCUUCAGCUACUGGUG | 7945 | CACCAGUAGCUGAAGACCA |
| 3279 | CACACCCCUGCCUAUUCUG | 8033 | CAGAAUAGGCAGGGGUGUG |
| 3297 | GUACUCGGGCUCUGACUAC | 8051 | GUAGUCAGAGCCCGAGUAC |
| 3298 | UACUCGGGCUCUGACUACA | 8052 | UGUAGUCAGAGCCCGAGUA |
| 3299 | ACUCGGGCUCUGACUACAG | 8053 | CUGUAGUCAGAGCCCGAGU |
| 3560 | GAGAAUACAUAGACCAGGC | 8314 | GCCUGGUCUAUGUAUUCUC |
| 3570 | AGACCAGGCCCAGAAUCGA | 8324 | UCGAUUCUGGGCCUGGUCU |
| 3576 | GGCCCAGAAUCGAAUCCAA | 8330 | UUGGAUUCGAUUCUGGGCC |
| 3580 | CAGAAUCGAAUCCAAUGUG | 8334 | CACAUUGGAUUCGAUUCUG |
| 3581 | AGAAUCGAAUCCAAUGUGC | 8335 | GCACAUUGGAUUCGAUUCU |
| 3583 | AAUCGAAUCCAAUGUGCCA | 8337 | UGGCACAUUGGAUUCGAUU |
| 3584 | AUCGAAUCCAAUGUGCCAU | 8338 | AUGGCACAUUGGAUUCGAU |
| 3586 | CGAAUCCAAUGUGCCAUCA | 8340 | UGAUGGCACAUUGGAUUCG |
| 3588 | AAUCCAAUGUGCCAUCAAG | 8342 | CUUGAUGGCACAUUGGAUU |
| 3597 | UGCCAUCAAGUCACUAAGU | 8351 | ACUUAGUGACUUGAUGGCA |
| 3600 | CAUCAAGUCACUAAGUCGC | 8354 | GCGACUUAGUGACUUGAUG |
| 3659 | GGCUGCUCAUGCGUGGCCU | 8413 | AGGCCACGCAUGAGCAGCC |
| 3673 | GGCCUGAACCACCCGAAUG | 8427 | CAUUCGGGUGGUUCAGGCC |
| 3676 | CUGAACCACCCGAAUGUGC | 8430 | GCACAUUCGGGUGGUUCAG |
| 3685 | CCGAAUGUGCUGGCUCUCA | 8439 | UGAGAGCCAGCACAUUCGG |
| 3701 | UCAUUGGUAUCAUGUUGCC | 8455 | GGCAACAUGAUACCAAUGA |
| 3705 | UGGUAUCAUGUUGCCACCU | 8459 | AGGUGGCAACAUGAUACCA |
| 3748 | CCCUAUAUGUGCCACGGUG | 8502 | CACCGUGGCACAUAUAGGG |
| 3749 | CCUAUAUGUGCCACGGUGA | 8503 | UCACCGUGGCACAUAUAGG |
| 3750 | CUAUAUGUGCCACGGUGAC | 8504 | GUCACCGUGGCACAUAUAG |
| 3752 | AUAUGUGCCACGGUGACCU | 8506 | AGGUCACCGUGGCACAUAU |
| 3773 | UCCAGUUCAUCCGCUCACC | 8527 | GGUGAGCGGAUGAACUGGA |
| 3777 | GUUCAUCCGCUCACCUCAG | 8531 | CUGAGGUGAGCGGAUGAAC |
| 3794 | AGCGGAACCCCACCGUGAA | 8548 | UUCACGGUGGGGUUCCGCU |
| 3795 | GCGGAACCCCACCGUGAAG | 8549 | CUUCACGGUGGGGUUCCGC |
| 3799 | AACCCCACCGUGAAGGACC | 8553 | GGUCCUUCACGGUGGGGUU |
| 3871 | AAGUUUGUGCACAGGGACC | 8625 | GGUCCCUGUGCACAAACUU |

[0265] The siRNAs in subset E have the following characteristics:
[0266] Cross-reactivity: With 19mer in human MST1R mRNA, with 17mer/19mer in NHP MST1R
[0267] Specificity category: For human and NHP: AS2 or better, SS3 or better
[0268] miRNA seeds: AS+SS strand: seed region not conserved in human, mouse, and rat and not present in >4 species. AS+SS strand: seed region not identical to seed region of known human miRNA
[0269] Off-target frequency: ≤15 human off-targets matched with 2 mismatches by antisense strand
[0270] SNPs: siRNA target sites do not harbor SNPs with a MAF >1% (pos. 2-18)

[0271] Subset F includes 103 siRNAs. The siRNAs in subset F include siRNAs from subset A, and are included in Table 8. In some cases, the sense strand of any of the siRNAs of subset F comprises modification pattern 6S (Table 9). In some cases, the antisense strand of any of the siRNAs of subset F comprises modification pattern 7AS (Table 9). In some cases, the sense strand of any of the siRNAs of subset F contains an alternative modification pattern (Table 10). In some cases, the antisense strand of any of the siRNAs of subset F comprises modification pattern 7AS (Table 10). The siRNAs in subset F may comprise any other modification pattern(s). In Table 9 and Table 10, Nf (e.g. Af, Cf, Gf, Tf, or Uf) is a 2′ fluoro-modified nucleoside, n (e.g. a, c, g, t, or u) is a 2′ O-methyl modified nucleoside, and “s” is a phosphorothioate linkage.

TABLE 8
Sequences in siRNA subset F

| SEQ ID | sense strand sequence | SEQ ID | antisense strand sequence |
|---|---|---|---|
| NO: | (5′-3′) | NO : | (5′-3′) |
| 469 | GCUGUGUUUGUAGCCAUAC | 5223 | GUAUGGCUACAAACACAGC |
| 471 | UGUGUUUGUAGCCAUACGC | 5225 | GCGUAUGGCUACAAACACA |
| 475 | UUUGUAGCCAUACGCAAUC | 5229 | GAUUGCGUAUGGCUACAAA |
| 476 | UUGUAGCCAUACGCAAUCG | 5230 | CGAUUGCGUAUGGCUACAA |
| 477 | UGUAGCCAUACGCAAUCGC | 5231 | GCGAUUGCGUAUGGCUACA |
| 483 | CAUACGCAAUCGCCUGCAU | 5237 | AUGCAGGCGAUUGCGUAUG |
| 692 | GCUUCCUGCAUGACCUAGA | 5446 | UCUAGGUCAUGCAGGAAGC |
| 693 | CUUCCUGCAUGACCUAGAG | 5447 | CUCUAGGUCAUGCAGGAAG |
| 753 | CUUCUCAGCCCACCAUAAC | 5507 | GUUAUGGUGGGCUGAGAAG |
| 845 | CCUCCUAUUUCUACGUGGC | 5599 | GCCACGUAGAAAUAGGAGG |
| 901 | CCACGCUCAGUGUCUAUCA | 5655 | UGAUAGACACUGAGCGUGG |
| 908 | CAGUGUCUAUCAGGCGUCU | 5662 | AGACGCCUGAUAGACACUG |
| 910 | GUGUCUAUCAGGCGUCUCA | 5664 | UGAGACGCCUGAUAGACAC |
| 911 | UGUCUAUCAGGCGUCUCAA | 5665 | UUGAGACGCCUGAUAGACA |
| 912 | GUCUAUCAGGCGUCUCAAG | 5666 | CUUGAGACGCCUGAUAGAC |
| 915 | UAUCAGGCGUCUCAAGGCU | 5669 | AGCCUUGAGACGCCUGAUA |
| 977 | UGCCCAAGCAUCUUGUCUC | 5731 | GAGACAAGAUGCUUGGGCA |
| 985 | CAUCUUGUCUCCUACAGUA | 5739 | UACUGUAGGAGACAAGAUG |
| 989 | UUGUCUCCUACAGUAUUGA | 5743 | UCAAUACUGUAGGAGACAA |
| 990 | UGUCUCCUACAGUAUUGAA | 5744 | UUCAAUACUGUAGGAGACA |
| 992 | UCUCCUACAGUAUUGAAUA | 5746 | UAUUCAAUACUGUAGGAGA |
| 1001 | GUAUUGAAUACGUGCACAG | 5755 | CUGUGCACGUAUUCAAUAC |
| 1003 | AUUGAAUACGUGCACAGCU | 5757 | AGCUGUGCACGUAUUCAAU |
| 1004 | UUGAAUACGUGCACAGCUU | 5758 | AAGCUGUGCACGUAUUCAA |
| 1006 | GAAUACGUGCACAGCUUCC | 5760 | GGAAGCUGUGCACGUAUUC |
| 1043 | ACUUCCUGACUGUACAGCC | 5797 | GGCUGUACAGUCAGGAAGU |
| 1124 | AGCCAGAGUUGGGUGACUA | 5878 | UAGUCACCCAACUCUGGCU |
| 1152 | GGUCCUCGACUGCAGAUUU | 5906 | AAAUCUGCAGUCGAGGACC |
| 1153 | GUCCUCGACUGCAGAUUUG | 5907 | CAAAUCUGCAGUCGAGGAC |
| 1154 | UCCUCGACUGCAGAUUUGC | 5908 | GCAAAUCUGCAGUCGAGGA |
| 1155 | CCUCGACUGCAGAUUUGCU | 5909 | AGCAAAUCUGCAGUCGAGG |
| 1158 | CGACUGCAGAUUUGCUCCA | 5912 | UGGAGCAAAUCUGCAGUCG |
| 1161 | CUGCAGAUUUGCUCCAAAA | 5915 | UUUUGGAGCAAAUCUGCAG |
| 1162 | UGCAGAUUUGCUCCAAAAC | 5916 | GUUUUGGAGCAAAUCUGCA |
| 1164 | CAGAUUUGCUCCAAAACGC | 5918 | GCGUUUUGGAGCAAAUCUG |
| 1408 | GUGGAGCGCUGUUGUGAAU | 6162 | AUUCACAACAGCGCUCCAC |
| 1409 | UGGAGCGCUGUUGUGAAUC | 6163 | GAUUCACAACAGCGCUCCA |
| 2124 | CAAGGACAGCUCAAAACUC | 6878 | GAGUUUUGAGCUGUCCUUG |
| 2150 | UGCCCCGGAAAGACUUUGU | 6904 | ACAAAGUCUUUCCGGGGCA |
| 2151 | GCCCCGGAAAGACUUUGUA | 6905 | UACAAAGUCUUUCCGGGGC |
| 2152 | CCCCGGAAAGACUUUGUAG | 6906 | CUACAAAGUCUUUCCGGGG |
| 2153 | CCCGGAAAGACUUUGUAGA | 6907 | UCUACAAAGUCUUUCCGGG |
| 2165 | UUGUAGAGGAGUUUGAGUG | 6919 | CACUCAAACUCCUCUACAA |
| 2230 | AGCCUCACCGUGACUAACA | 6984 | UGUUAGUCACGGUGAGGCU |
| 2233 | CUCACCGUGACUAACAUGC | 6987 | GCAUGUUAGUCACGGUGAG |
| 2234 | UCACCGUGACUAACAUGCC | 6988 | GGCAUGUUAGUCACGGUGA |
| 2235 | CACCGUGACUAACAUGCCA | 6989 | UGGCAUGUUAGUCACGGUG |
| 2318 | UGCUGAUAGCAGUGCAACC | 7072 | GGUUGCACUGCUAUCAGCA |
| 2366 | GUCUCACUCUUGAAGGCCA | 7120 | UGGCCUUCAAGAGUGAGAC |
| 2369 | UCACUCUUGAAGGCCAGAG | 7123 | CUCUGGCCUUCAAGAGUGA |
| 2412 | UGUGCUGGUCAAUGGGACU | 7166 | AGUCCCAUUGACCAGCACA |
| 2418 | GGUCAAUGGGACUGAGUGU | 7172 | ACACUCAGUCCCAUUGACC |
| 2420 | UCAAUGGGACUGAGUGUCU | 7174 | AGACACUCAGUCCCAUUGA |
| 2421 | CAAUGGGACUGAGUGUCUG | 7175 | CAGACACUCAGUCCCAUUG |
| 2427 | GACUGAGUGUCUGCUAGCA | 7181 | UGCUAGCAGACACUCAGUC |
| 2455 | GAGGGGCAGCUUUUAUGUG | 7209 | CACAUAAAAGCUGCCCCUC |
| 2460 | GCAGCUUUUAUGUGCCACA | 7214 | UGUGGCACAUAAAAGCUGC |
| 2462 | AGCUUUUAUGUGCCACACC | 7216 | GGUGUGGCACAUAAAAGCU |
| 2566 | GAAGACCCUGUCGUGCUAA | 7320 | UUAGCACGACAGGGUCUUC |
| 2567 | AAGACCCUGUCGUGCUAAG | 7321 | CUUAGCACGACAGGGUCUU |
| 2581 | CUAAGCAUCAGCCCCAACU | 7335 | AGUUGGGGCUGAUGCUUAG |
| 2582 | UAAGCAUCAGCCCCAACUG | 7336 | CAGUUGGGGCUGAUGCUUA |
| 2628 | CUGUGGCCAGCAUCUAACU | 7382 | AGUUAGAUGCUGGCCACAG |
| 2644 | ACUUCAGCAUGGCACUUAG | 7398 | CUAAGUGCCAUGCUGAAGU |
| 2646 | UUCAGCAUGGCACUUAGUG | 7400 | CACUAAGUGCCAUGCUGAA |
| 2648 | CAGCAUGGCACUUAGUGCU | 7402 | AGCACUAAGUGCCAUGCUG |
| 2656 | CACUUAGUGCUGUCAUUCC | 7410 | GGAAUGACAGCACUAAGUG |
| 2663 | UGCUGUCAUUCCAUGACGG | 7417 | CCGUCAUGGAAUGACAGCA |
| 2666 | UGUCAUUCCAUGACGGGCU | 7420 | AGCCCGUCAUGGAAUGACA |
| 2669 | CAUUCCAUGACGGGCUUAG | 7423 | CUAAGCCCGUCAUGGAAUG |
| 2670 | AUUCCAUGACGGGCUUAGG | 7424 | CCUAAGCCCGUCAUGGAAU |
| 2889 | UGAGGAGCAUGCCAUUAAG | 7643 | CUUAAUGGCAUGCUCCUCA |
| 2895 | GCAUGCCAUUAAGUUUGAG | 7649 | CUCAAACUUAAUGGCAUGC |
| 3084 | UAUCCUGGGUAGAGUGGUG | 7838 | CACCACUCUACCCAGGAUA |
| 3191 | UGGUCUUCAGCUACUGGUG | 7945 | CACCAGUAGCUGAAGACCA |
| 3223 | CUAGUUCUUCCUCCCAACC | 7977 | GGUUGGGAGGAAGAACUAG |
| 3298 | UACUCGGGCUCUGACUACA | 8052 | UGUAGUCAGAGCCCGAGUA |
| 3538 | CACUUUGGAGUUGUCUACC | 8292 | GGUAGACAACUCCAAAGUG |
| 3560 | GAGAAUACAUAGACCAGGC | 8314 | GCCUGGUCUAUGUAUUCUC |
| 3568 | AUAGACCAGGCCCAGAAUC | 8322 | GAUUCUGGGCCUGGUCUAU |
| 3576 | GGCCCAGAAUCGAAUCCAA | 8330 | UUGGAUUCGAUUCUGGGCC |
| 3578 | CCCAGAAUCGAAUCCAAUG | 8332 | CAUUGGAUUCGAUUCUGGG |
| 3580 | CAGAAUCGAAUCCAAUGUG | 8334 | CACAUUGGAUUCGAUUCUG |
| 3581 | AGAAUCGAAUCCAAUGUGC | 8335 | GCACAUUGGAUUCGAUUCU |
| 3582 | GAAUCGAAUCCAAUGUGCC | 8336 | GGCACAUUGGAUUCGAUUC |
| 3586 | CGAAUCCAAUGUGCCAUCA | 8340 | UGAUGGCACAUUGGAUUCG |
| 3587 | GAAUCCAAUGUGCCAUCAA | 8341 | UUGAUGGCACAUUGGAUUC |
| 3592 | CAAUGUGCCAUCAAGUCAC | 8346 | GUGACUUGAUGGCACAUUG |
| 3595 | UGUGCCAUCAAGUCACUAA | 8349 | UUAGUGACUUGAUGGCACA |
| 3596 | GUGCCAUCAAGUCACUAAG | 8350 | CUUAGUGACUUGAUGGCAC |
| 3597 | UGCCAUCAAGUCACUAAGU | 8351 | ACUUAGUGACUUGAUGGCA |
| 3600 | CAUCAAGUCACUAAGUCGC | 8354 | GCGACUUAGUGACUUGAUG |
| 3701 | UCAUUGGUAUCAUGUUGCC | 8455 | GGCAACAUGAUACCAAUGA |
| 3749 | CCUAUAUGUGCCACGGUGA | 8503 | UCACCGUGGCACAUAUAGG |
| 3750 | CUAUAUGUGCCACGGUGAC | 8504 | GUCACCGUGGCACAUAUAG |
| 3751 | UAUAUGUGCCACGGUGACC | 8505 | GGUCACCGUGGCACAUAUA |
| 3752 | AUAUGUGCCACGGUGACCU | 8506 | AGGUCACCGUGGCACAUAU |
| 3871 | AAGUUUGUGCACAGGGACC | 8625 | GGUCCCUGUGCACAAACUU |
| 4284 | GGUGGAGCAGAUAGUGUCU | 9038 | AGACACUAUCUGCUCCACC |
| 4292 | AGAUAGUGUCUGCACUGCU | 9046 | AGCAGUGCAGACACUAUCU |
| 4311 | UGGGGACCAUUAUGUGCAG | 9065 | CUGCACAUAAUGGUCCCCA |
| 4313 | GGGACCAUUAUGUGCAGCU | 9067 | AGCUGCACAUAAUGGUCCC |
| 4333 | CCAGCAACCUACAUGAACU | 9087 | AGUUCAUGUAGGUUGCUGG |

TABLE 9
Modified siRNA subset F sequences (a.k.a. subset G)

| | SEQ | | SEQ | |
|---|---|---|---|---|
| siRNA | ID | | ID | |
| Name | NO: | Sense strand sequence (5′-3′) | NO: | Antisense strand sequence (5′-3′) |
| siRNA | 9509 | GfscsUfgUfgUfuUfgUfaGfcCfaUfaAfsusu | 9612 | usUfsaUfgGfcUfaCfaAfaCfaCfaGfcsusu |
| 9509 | | | | |
| siRNA | 9510 | UfsgsUfgUfuUfgUfaGfcCfaUfaCfgAfsusu | 9613 | usCfsgUfaUfgGfcUfaCfaAfaCfaCfasusu |
| 9510 | | | | |
| siRNA | 9511 | UfsusUfgUfaGfcCfaUfaCfgCfaAfuAfsusu | 9614 | usAfsuUfgCfgUfaUfgGfcUfaCfaAfasusu |
| 9511 | | | | |
| siRNA | 9512 | UfsusGfuAfgCfcAfuAfcGfcAfaUfcAfsusu | 9615 | usGfsaUfuGfcGfuAfuGfgCfuAfcAfasusu |
| 9512 | | | | |
| siRNA | 9513 | UfsgsUfaGfcCfaUfaCfgCfaAfuCfgAfsusu | 9616 | usCfsgAfuUfgCfgUfaUfgGfcUfaCfasusu |
| 9513 | | | | |
| siRNA | 9514 | CfsasUfaCfgCfaAfuCfgCfcUfgCfaAfsusu | 9617 | usUfsgCfaGfgCfgAfuUfgCfgUfaUfgsusu |
| 9514 | | | | |
| siRNA | 9515 | GfscsUfuCfcUfgCfaUfgAfcCfuAfgAfsusu | 9618 | usCfsuAfgGfuCfaUfgCfaGfgAfaGfcsusu |
| 9515 | | | | |
| siRNA | 9516 | CfsusUfcCfuGfcAfuGfaCfcUfaGfaAfsusu | 9619 | usUfscUfaGfgUfcAfuGfcAfgGfaAfgsusu |
| 9516 | | | | |
| siRNA | 9517 | CfsusUfcUfcAfgCfcCfaCfcAfuAfaAfsusu | 9620 | usUfsuAfuGfgUfgGfgCfuGfaGfaAfgsusu |
| 9517 | | | | |
| siRNA | 9518 | CfscsUfcCfuAfuUfuCfuAfcGfuGfgAfsusu | 9621 | usCfscAfcGfuAfgAfaAfuAfgGfaGfgsusu |
| 9518 | | | | |
| siRNA | 9519 | CfscsAfcGfcUfcAfgUfgUfcUfaUfcAfsusu | 9622 | usGfsaUfaGfaCfaCfuGfaGfcGfuGfgsusu |
| 9519 | | | | |
| siRNA | 9520 | CfsasGfuGfuCfuAfuCfaGfgCfgUfcAfsusu | 9623 | usGfsaCfgCfcUfgAfuAfgAfcAfcUfgsusu |
| 9520 | | | | |
| siRNA | 9521 | GfsusGfuCfuAfuCfaGfgCfgUfcUfcAfsusu | 9624 | usGfsaGfaCfgCfcUfgAfuAfgAfcAfcsusu |
| 9521 | | | | |
| siRNA | 9522 | UfsgsUfcUfaUfcAfgGfcGfuCfuCfaAfsusu | 9625 | usUfsgAfgAfcGfcCfuGfaUfaGfaCfasusu |
| 9522 | | | | |
| siRNA | 9523 | GfsusCfuAfuCfaGfgCfgUfcUfcAfaAfsusu | 9626 | usUfsuGfaGfaCfgCfcUfgAfuAfgAfcsusu |
| 9523 | | | | |
| siRNA | 9524 | UfsasUfcAfgGfcGfuCfuCfaAfgGfcAfsusu | 9627 | usGfscCfuUfgAfgAfcGfcCfuGfaUfasusu |
| 9524 | | | | |
| siRNA | 9525 | UfsgsCfcCfaAfgCfaUfcUfuGfuCfuAfsusu | 9628 | usAfsgAfcAfaGfaUfgCfuUfgGfgCfasusu |
| 9525 | | | | |
| siRNA | 9526 | CfsasUfcUfuGfuCfuCfcUfaCfaGfuAfsusu | 9629 | usAfscUfgUfaGfgAfgAfcAfaGfaUfgsusu |
| 9526 | | | | |
| siRNA | 9527 | UfsusGfuCfuCfcUfaCfaGfuAfuUfgAfsusu | 9630 | usCfsaAfuAfcUfgUfaGfgAfgAfcAfasusu |
| 9527 | | | | |
| siRNA | 9528 | UfsgsUfcUfcCfuAfcAfgUfaUfuGfaAfsusu | 9631 | usUfscAfaUfaCfuGfuAfgGfaGfaCfasusu |
| 9528 | | | | |
| siRNA | 9529 | UfscsUfcCfuAfcAfgUfaUfuGfaAfuAfsusu | 9632 | usAfsuUfcAfaUfaCfuGfuAfgGfaGfasusu |
| 9529 | | | | |
| siRNA | 9530 | GfsusAfuUfgAfaUfaCfgUfgCfaCfaAfsusu | 9633 | usUfsgUfgCfaCfgUfaUfuCfaAfuAfcsusu |
| 9530 | | | | |
| siRNA | 9531 | AfsusUfgAfaUfaCfgUfgCfaCfaGfcAfsusu | 9634 | usGfscUfgUfgCfaCfgUfaUfuCfaAfususu |
| 9531 | | | | |
| siRNA | 9532 | UfsusGfaAfuAfcGfuGfcAfcAfgCfuAfsusu | 9635 | usAfsgCfuGfuGfcAfcGfuAfuUfcAfasusu |
| 9532 | | | | |
| siRNA | 9533 | GfsasAfuAfcGfuGfcAfcAfgCfuUfcAfsusu | 9636 | usGfsaAfgCfuGfuGfcAfcGfuAfuUfcsusu |
| 9533 | | | | |
| siRNA | 9534 | AfscsUfuCfcUfgAfcUfgUfaCfaGfcAfsusu | 9637 | usGfscUfgUfaCfaGfuCfaGfgAfaGfususu |
| 9534 | | | | |
| siRNA | 9535 | AfsgsCfcAfgAfgUfuGfgGfuGfaCfuAfsusu | 9638 | usAfsgUfcAfcCfcAfaCfuCfuGfgCfususu |
| 9535 | | | | |
| siRNA | 9536 | GfsgsUfcCfuCfgAfcUfgCfaGfaUfuAfsusu | 9639 | usAfsaUfcUfgCfaGfuCfgAfgGfaCfcsusu |
| 9536 | | | | |
| siRNA | 9537 | GfsusCfcUfcGfaCfuGfcAfgAfuUfuAfsusu | 9640 | usAfsaAfuCfuGfcAfgUfcGfaGfgAfcsusu |
| 9537 | | | | |
| siRNA | 9538 | UfscsCfuCfgAfcUfgCfaGfaUfuUfgAfsusu | 9641 | usCfsaAfaUfcUfgCfaGfuCfgAfgGfasusu |
| 9538 | | | | |
| siRNA | 9539 | CfscsUfcGfaCfuGfcAfgAfuUfuGfcAfsusu | 9642 | usGfscAfaAfuCfuGfcAfgUfcGfaGfgsusu |
| 9539 | | | | |
| siRNA | 9540 | CfsgsAfcUfgCfaGfaUfuUfgCfuCfcAfsusu | 9643 | usGfsgAfgCfaAfaUfcUfgCfaGfuCfgsusu |
| 9540 | | | | |
| siRNA | 9541 | CfsusGfcAfgAfuUfuGfcUfcCfaAfaAfsusu | 9644 | usUfsuUfgGfaGfcAfaAfuCfuGfcAfgsusu |
| 9541 | | | | |
| siRNA | 9542 | UfsgsCfaGfaUfuUfgCfuCfcAfaAfaAfsusu | 9645 | usUfsuUfuGfgAfgCfaAfaUfcUfgCfasusu |
| 9542 | | | | |
| siRNA | 9543 | CfsasGfaUfuUfgCfuCfcAfaAfaCfgAfsusu | 9646 | usCfsgUfuUfuGfgAfgCfaAfaUfcUfgsusu |
| 9543 | | | | |
| siRNA | 9544 | GfsusGfgAfgCfgCfuGfuUfgUfgAfaAfsusu | 9647 | usUfsuCfaCfaAfcAfgCfgCfuCfcAfcsusu |
| 9544 | | | | |
| siRNA | 9545 | UfsgsGfaGfcGfcUfgUfuGfuGfaAfuAfsusu | 9648 | usAfsuUfcAfcAfaCfaGfcGfcUfcCfasusu |
| 9545 | | | | |
| siRNA | 9546 | CfsasAfgGfaCfaGfcUfcAfaAfaCfuAfsusu | 9649 | usAfsgUfuUfuGfaGfcUfgUfcCfuUfgsusu |
| 9546 | | | | |
| siRNA | 9547 | UfsgsCfcCfcGfgAfaAfgAfcUfuUfgAfsusu | 9650 | usCfsaAfaGfuCfuUfuCfcGfgGfgCfasusu |
| 9547 | | | | |
| siRNA | 9548 | GfscsCfcCfgGfaAfaGfaCfuUfuGfuAfsusu | 9651 | usAfscAfaAfgUfcUfuUfcCfgGfgGfcsusu |
| 9548 | | | | |
| siRNA | 9549 | CfscsCfcGfgAfaAfgAfcUfuUfgUfaAfsusu | 9652 | usUfsaCfaAfaGfuCfuUfuCfcGfgGfgsusu |
| 9549 | | | | |
| siRNA | 9550 | CfscsCfgGfaAfaGfaCfuUfuGfuAfgAfsusu | 9653 | usCfsuAfcAfaAfgUfcUfuUfcCfgGfgsusu |
| 9550 | | | | |
| siRNA | 9551 | UfsusGfuAfgAfgGfaGfuUfuGfaGfuAfsusu | 9654 | usAfscUfcAfaAfcUfcCfuCfuAfcAfasusu |
| 9551 | | | | |
| siRNA | 9552 | AfsgsCfcUfcAfcCfgUfgAfcUfaAfcAfsusu | 9655 | usGfsuUfaGfuCfaCfgGfuGfaGfgCfususu |
| 9552 | | | | |
| siRNA | 9553 | CfsusCfaCfcGfuGfaCfuAfaCfaUfgAfsusu | 9656 | usCfsaUfgUfuAfgUfcAfcGfgUfgAfgsusu |
| 9553 | | | | |
| siRNA | 9554 | UfscsAfcCfgUfgAfcUfaAfcAfuGfcAfsusu | 9657 | usGfscAfuGfuUfaGfuCfaCfgGfuGfasusu |
| 9554 | | | | |
| siRNA | 9555 | CfsasCfcGfuGfaCfuAfaCfaUfgCfcAfsusu | 9658 | usGfsgCfaUfgUfuAfgUfcAfcGfgUfgsusu |
| 9555 | | | | |
| siRNA | 9556 | UfsgsCfuGfaUfaGfcAfgUfgCfaAfcAfsusu | 9659 | usGfsuUfgCfaCfuGfcUfaUfcAfgCfasusu |
| 9556 | | | | |
| siRNA | 9557 | GfsusCfuCfaCfuCfuUfgAfaGfgCfcAfsusu | 9660 | usGfsgCfcUfuCfaAfgAfgUfgAfgAfcsusu |
| 9557 | | | | |
| siRNA | 9558 | UfscsAfcUfcUfuGfaAfgGfcCfaGfaAfsusu | 9661 | usUfscUfgGfcCfuUfcAfaGfaGfuGfasusu |
| 9558 | | | | |
| siRNA | 9559 | UfsgsUfgCfuGfgUfcAfaUfgGfgAfcAfsusu | 9662 | usGfsuCfcCfaUfuGfaCfcAfgCfaCfasusu |
| 9559 | | | | |
| siRNA | 9560 | GfsgsUfcAfaUfgGfgAfcUfgAfgUfgAfsusu | 9663 | usCfsaCfuCfaGfuCfcCfaUfuGfaCfcsusu |
| 9560 | | | | |
| siRNA | 9561 | UfscsAfaUfgGfgAfcUfgAfgUfgUfcAfsusu | 9664 | usGfsaCfaCfuCfaGfuCfcCfaUfuGfasusu |
| 9561 | | | | |
| siRNA | 9562 | CfsasAfuGfgGfaCfuGfaGfuGfuCfuAfsusu | 9665 | usAfsgAfcAfcUfcAfgUfcCfcAfuUfgsusu |
| 9562 | | | | |
| siRNA | 9563 | GfsasCfuGfaGfuGfuCfuGfcUfaGfcAfsusu | 9666 | usGfscUfaGfcAfgAfcAfcUfcAfgUfcsusu |
| 9563 | | | | |
| siRNA | 9564 | GfsasGfgGfgCfaGfcUfuUfuAfuGfuAfsusu | 9667 | usAfscAfuAfaAfaGfcUfgCfcCfcUfcsusu |
| 9564 | | | | |
| siRNA | 9565 | GfscsAfgCfuUfuUfaUfgUfgCfcAfcAfsusu | 9668 | usGfsuGfgCfaCfaUfaAfaAfgCfuGfcsusu |
| 9565 | | | | |
| siRNA | 9566 | AfsgsCfuUfuUfaUfgUfgCfcAfcAfcAfsusu | 9669 | usGfsuGfuGfgCfaCfaUfaAfaAfgCfususu |
| 9566 | | | | |
| siRNA | 9567 | GfsasAfgAfcCfcUfgUfcGfuGfcUfaAfsusu | 9670 | usUfsaGfcAfcGfaCfaGfgGfuCfuUfcsusu |
| 9567 | | | | |
| siRNA | 9568 | AfsasGfaCfcCfuGfuCfgUfgCfuAfaAfsusu | 9671 | usUfsuAfgCfaCfgAfcAfgGfgUfcUfususu |
| 9568 | | | | |
| siRNA | 9569 | CfsusAfaGfcAfuCfaGfcCfcCfaAfcAfsusu | 9672 | usGfsuUfgGfgGfcUfgAfuGfcUfuAfgsusu |
| 9569 | | | | |
| siRNA | 9570 | UfsasAfgCfaUfcAfgCfcCfcAfaCfuAfsusu | 9673 | usAfsgUfuGfgGfgCfuGfaUfgCfuUfasusu |
| 9570 | | | | |
| siRNA | 9571 | CfsusGfuGfgCfcAfgCfaUfcUfaAfcAfsusu | 9674 | usGfsuUfaGfaUfgCfuGfgCfcAfcAfgsusu |
| 9571 | | | | |
| siRNA | 9572 | AfscsUfuCfaGfcAfuGfgCfaCfuUfaAfsusu | 9675 | usUfsaAfgUfgCfcAfuGfcUfgAfaGfususu |
| 9572 | | | | |
| siRNA | 9573 | UfsusCfaGfcAfuGfgCfaCfuUfaGfuAfsusu | 9676 | usAfscUfaAfgUfgCfcAfuGfcUfgAfasusu |
| 9573 | | | | |
| siRNA | 9574 | CfsasGfcAfuGfgCfaCfuUfaGfuGfcAfsusu | 9677 | usGfscAfcUfaAfgUfgCfcAfuGfcUfgsusu |
| 9574 | | | | |
| siRNA | 9575 | CfsasCfuUfaGfuGfcUfgUfcAfuUfcAfsusu | 9678 | usGfsaAfuGfaCfaGfcAfcUfaAfgUfgsusu |
| 9575 | | | | |
| siRNA | 9576 | UfsgsCfuGfuCfaUfuCfcAfuGfaCfgAfsusu | 9679 | usCfsgUfcAfuGfgAfaUfgAfcAfgCfasusu |
| 9576 | | | | |
| siRNA | 9577 | UfsgsUfcAfuUfcCfaUfgAfcGfgGfcAfsusu | 9680 | usGfscCfcGfuCfaUfgGfaAfuGfaCfasusu |
| 9577 | | | | |
| siRNA | 9578 | CfsasUfuCfcAfuGfaCfgGfgCfuUfaAfsusu | 9681 | usUfsaAfgCfcCfgUfcAfuGfgAfaUfgsusu |
| 9578 | | | | |
| siRNA | 9579 | AfsusUfcCfaUfgAfcGfgGfcUfuAfgAfsusu | 9682 | usCfsuAfaGfcCfcGfuCfaUfgGfaAfususu |
| 9579 | | | | |
| siRNA | 9580 | UfsgsAfgGfaGfcAfuGfcCfaUfuAfaAfsusu | 9683 | usUfsuAfaUfgGfcAfuGfcUfcCfuCfasusu |
| 9580 | | | | |
| siRNA | 9581 | GfscsAfuGfcCfaUfuAfaGfuUfuGfaAfsusu | 9684 | usUfscAfaAfcUfuAfaUfgGfcAfuGfcsusu |
| 9581 | | | | |
| siRNA | 9582 | UfsasUfcCfuGfgGfuAfgAfgUfgGfuAfsusu | 9685 | usAfscCfaCfuCfuAfcCfcAfgGfaUfasusu |
| 9582 | | | | |
| siRNA | 9583 | UfsgsGfuCfuUfcAfgCfuAfcUfgGfuAfsusu | 9686 | usAfscCfaGfuAfgCfuGfaAfgAfcCfasusu |
| 9583 | | | | |
| siRNA | 9584 | CfsusAfgUfuCfuUfcCfuCfcCfaAfcAfsusu | 9687 | usGfsuUfgGfgAfgGfaAfgAfaCfuAfgsusu |
| 9584 | | | | |
| siRNA | 9585 | UfsasCfuCfgGfgCfuCfuGfaCfuAfcAfsusu | 9688 | usGfsuAfgUfcAfgAfgCfcCfgAfgUfasusu |
| 9585 | | | | |
| siRNA | 9586 | CfsasCfuUfuGfgAfgUfuGfuCfuAfcAfsusu | 9689 | usGfsuAfgAfcAfaCfuCfcAfaAfgUfgsusu |
| 9586 | | | | |
| siRNA | 9587 | GfsasGfaAfuAfcAfuAfgAfcCfaGfgAfsusu | 9690 | usCfscUfgGfuCfuAfuGfuAfuUfcUfcsusu |
| 9587 | | | | |
| siRNA | 9588 | AfsusAfgAfcCfaGfgCfcCfaGfaAfuAfsusu | 9691 | usAfsuUfcUfgGfgCfcUfgGfuCfuAfususu |
| 9588 | | | | |
| siRNA | 9589 | GfsgsCfcCfaGfaAfuCfgAfaUfcCfaAfsusu | 9692 | usUfsgGfaUfuCfgAfuUfcUfgGfgCfcsusu |
| 9589 | | | | |
| siRNA | 9590 | CfscsCfaGfaAfuCfgAfaUfcCfaAfuAfsusu | 9693 | usAfsuUfgGfaUfuCfgAfuUfcUfgGfgsusu |
| 9590 | | | | |
| siRNA | 9591 | CfsasGfaAfuCfgAfaUfcCfaAfuGfuAfsusu | 9694 | usAfscAfuUfgGfaUfuCfgAfuUfcUfgsusu |
| 9591 | | | | |
| siRNA | 9592 | AfsgsAfaUfcGfaAfuCfcAfaUfgUfgAfsusu | 9695 | usCfsaCfaUfuGfgAfuUfcGfaUfuCfususu |
| 9592 | | | | |
| siRNA | 9593 | GfsasAfuCfgAfaUfcCfaAfuGfuGfcAfsusu | 9696 | usGfscAfcAfuUfgGfaUfuCfgAfuUfcsusu |
| 9593 | | | | |
| siRNA | 9594 | CfsgsAfaUfcCfaAfuGfuGfcCfaUfcAfsusu | 9697 | usGfsaUfgGfcAfcAfuUfgGfaUfuCfgsusu |
| 9594 | | | | |
| siRNA | 9595 | GfsasAfuCfcAfaUfgUfgCfcAfuCfaAfsusu | 9698 | usUfsgAfuGfgCfaCfaUfuGfgAfuUfcsusu |
| 9595 | | | | |
| siRNA | 9596 | CfsasAfuGfuGfcCfaUfcAfaGfuCfaAfsusu | 9699 | usUfsgAfcUfuGfaUfgGfcAfcAfuUfgsusu |
| 9596 | | | | |
| siRNA | 9597 | UfsgsUfgCfcAfuCfaAfgUfcAfcUfaAfsusu | 9700 | usUfsaGfuGfaCfuUfgAfuGfgCfaCfasusu |
| 9597 | | | | |
| siRNA | 9598 | GfsusGfcCfaUfcAfaGfuCfaCfuAfaAfsusu | 9701 | usUfsuAfgUfgAfcUfuGfaUfgGfcAfcsusu |
| 9598 | | | | |
| siRNA | 9599 | UfsgsCfcAfuCfaAfgUfcAfcUfaAfgAfsusu | 9702 | usCfsuUfaGfuGfaCfuUfgAfuGfgCfasusu |
| 9599 | | | | |
| siRNA | 9600 | CfsasUfcAfaGfuCfaCfuAfaGfuCfgAfsusu | 9703 | usCfsgAfcUfuAfgUfgAfcUfuGfaUfgsusu |
| 9600 | | | | |
| siRNA | 9601 | UfscsAfuUfgGfuAfuCfaUfgUfuGfcAfsusu | 9704 | usGfscAfaCfaUfgAfuAfcCfaAfuGfasusu |
| 9601 | | | | |
| siRNA | 9602 | CfscsUfaUfaUfgUfgCfcAfcGfgUfgAfsusu | 9705 | usCfsaCfcGfuGfgCfaCfaUfaUfaGfgsusu |
| 9602 | | | | |
| siRNA | 9603 | CfsusAfuAfuGfuGfcCfaCfgGfuGfaAfsusu | 9706 | usUfscAfcCfgUfgGfcAfcAfuAfuAfgsusu |
| 9603 | | | | |
| siRNA | 9604 | UfsasUfaUfgUfgCfcAfcGfgUfgAfcAfsusu | 9707 | usGfsuCfaCfcGfuGfgCfaCfaUfaUfasusu |
| 9604 | | | | |
| siRNA | 9605 | AfsusAfuGfuGfcCfaCfgGfuGfaCfcAfsusu | 9708 | usGfsgUfcAfcCfgUfgGfcAfcAfuAfususu |
| 9605 | | | | |
| siRNA | 9606 | AfsasGfuUfuGfuGfcAfcAfgGfgAfcAfsusu | 9709 | usGfsuCfcCfuGfuGfcAfcAfaAfcUfususu |
| 9606 | | | | |
| siRNA | 9607 | GfsgsUfgGfaGfcAfgAfuAfgUfgUfcAfsusu | 9710 | usGfsaCfaCfuAfuCfuGfcUfcCfaCfcsusu |
| 9607 | | | | |
| siRNA | 9608 | AfsgsAfuAfgUfgUfcUfgCfaCfuGfcAfsusu | 9711 | usGfscAfgUfgCfaGfaCfaCfuAfuCfususu |
| 9608 | | | | |
| siRNA | 9609 | UfsgsGfgGfaCfcAfuUfaUfgUfgCfaAfsusu | 9712 | usUfsgCfaCfaUfaAfuGfgUfcCfcCfasusu |
| 9609 | | | | |
| siRNA | 9610 | GfsgsGfaCfcAfuUfaUfgUfgCfaGfcAfsusu | 9713 | usGfscUfgCfaCfaUfaAfuGfgUfcCfcsusu |
| 9610 | | | | |
| siRNA | 9611 | CfscsAfgCfaAfcCfuAfcAfuGfaAfcAfsusu | 9714 | usGfsuUfcAfuGfuAfgGfuUfgCfuGfgsusu |
| 9611 | | | | |

TABLE 10
Alternatively modified siRNA subset F sequences (a.k.a. subset H)

| siRNA | SEQ ID | sense strand sequence | SEQ ID | antisense strand |
|---|---|---|---|---|
| Name | NO: | (5′-3′) | NO: | (5′-3′) |
| ETD01363 | 9715 | gscsugUfgUfuUfgUfagcc | 9612 | usUfsaUfgGfcUfaCfaAfaCfa |
| | | auaasusu | | CfaGfcsusu |
| ETD01364 | 9716 | usgsugUfuUfgUfagccaua | 9613 | usCfsgUfaUfgGfcUfaCfaAfa |
| | | cgasusu | | CfaCfasusu |
| ETD01365 | 9717 | ususugUfagCfCfaUfacgc | 9614 | usAfsuUfgCfgUfaUfgGfcUfa |
| | | aauasusu | | CfaAfasusu |
| ETD01366 | 9718 | ususguAfgccAfuAfcgcaa | 9615 | usGfsaUfuGfcGfuAfuGfgCfu |
| | | ucasusu | | AfcAfasusu |
| ETD01367 | 9719 | usgsuagCfCfaUfaCfgcaa | 9616 | usCfsgAfuUfgCfgUfaUfgGfc |
| | | ucgasusu | | UfaCfasusu |
| ETD01368 | 9720 | csasuacGfcAfAfucgccug | 9617 | usUfsgCfaGfgCfgAfuUfgCfg |
| | | caasusu | | UfaUfgsusu |
| ETD01369 | 9721 | gscsuuCfCfugCfaugaccu | 9618 | usCfsuAfgGfuCfaUfgCfaGfg |
| | | agasusu | | AfaGfcsusu |
| ETD01370 | 9722 | csusuccuGfcAfuGfaccua | 9619 | usUfscUfaGfgUfcAfuGfcAfg |
| | | gaasusu | | GfaAfgsusu |
| ETD01371 | 9723 | csusucuCfagCfcCfaccau | 9620 | usUfsuAfuGfgUfgGfgCfuGfa |
| | | aaasusu | | GfaAfgsusu |
| ETD01372 | 9724 | cscsuccUfaUfUfUfCfuac | 9621 | usCfscAfcGfuAfgAfaAfuAfg |
| | | guggasusu | | GfaGfgsusu |
| ETD01373 | 9725 | cscsacGfcucAfGfugucua | 9622 | usGfsaUfaGfaCfaCfuGfaGfc |
| | | ucasusu | | GfuGfgsusu |
| ETD01374 | 9726 | csasguGfucuAfucaggcgu | 9623 | usGfsaCfgCfcUfgAfuAfgAfc |
| | | casusu | | AfcUfgsusu |
| ETD01375 | 9727 | gsusguCfUfaUfCfaggcgu | 9624 | usGfsaGfaCfgCfcUfgAfuAfg |
| | | cucasusu | | AfcAfcsusu |
| ETD01376 | 9728 | usgsucuAfucAfgGfcgucu | 9625 | usUfsgAfgAfcGfcCfuGfaUfa |
| | | caasusu | | GfaCfasusu |
| ETD01377 | 9729 | gsuscuAfucaGfGfcgucuc | 9626 | usUfsuGfaGfaCfgCfcUfgAfu |
| | | aaasusu | | AfgAfcsusu |
| ETD01378 | 9730 | usasucaGfGfcGfucucaag | 9627 | usGfscCfuUfgAfgAfcGfcCfu |
| | | gcasusu | | GfaUfasusu |
| ETD01379 | 9731 | usgsccCfaagCfaUfcuugu | 9628 | usAfsgAfcAfaGfaUfgCfuUfg |
| | | cuasusu | | GfgCfasusu |
| ETD01380 | 9732 | csasucUfugUfCfUfCfcua | 9629 | usAfscUfgUfaGfgAfgAfcAfa |
| | | caguasusu | | GfaUfgsusu |
| ETD01381 | 9733 | ususguCfUfCfCfUfacagu | 9630 | usCfsaAfuAfcUfgUfaGfgAfg |
| | | auugasusu | | AfcAfasusu |
| ETD01382 | 9734 | usgsucuccuAfcAfguauug | 9631 | usUfscAfaUfaCfuGfuAfgGfa |
| | | aasusu | | GfaCfasusu |
| ETD01383 | 9735 | uscsuccuAfcAfGfuauuga | 9632 | usAfsuUfcAfaUfaCfuGfuAfg |
| | | auasusu | | GfaGfasusu |
| ETD01384 | 9736 | gsusauUfgaaUfaCfgugca | 9633 | usUfsgUfgCfaCfgUfaUfuCfa |
| | | caasusu | | AfuAfcsusu |
| ETD01385 | 9737 | asusugaaUfaCfgUfgcaca | 9634 | usGfscUfgUfgCfaCfgUfaUfu |
| | | gcasusu | | CfaAfususu |
| ETD01386 | 9738 | ususgaAfuAfcGfuGfcaca | 9635 | usAfsgCfuGfuGfcAfcGfuAfu |
| | | gcuasusu | | UfcAfasusu |
| ETD01387 | 9739 | gsasauAfcGfuGfcAfcagc | 9636 | usGfsaAfgCfuGfuGfcAfcGfu |
| | | uucasusu | | AfuUfcsusu |
| ETD01388 | 9740 | ascsuuccuGfAfcuguacag | 9637 | usGfscUfgUfaCfaGfuCfaGfg |
| | | casusu | | AfaGfususu |
| ETD01389 | 9741 | asgsccagagUfUfgggugac | 9638 | usAfsgUfcAfcCfcAfaCfuCfu |
| | | uasusu | | GfgCfususu |
| ETD01390 | 9742 | gsgsuccucGfAfcugcagau | 9639 | usAfsaUfcUfgCfaGfuCfgAfg |
| | | uasusu | | GfaCfcsusu |
| ETD01391 | 9743 | gsusccUfCfgaCfUfgcaga | 9640 | usAfsaAfuCfuGfcAfgUfcGfa |
| | | uuuasusu | | GfgAfcsusu |
| ETD01392 | 9744 | uscscuCfgaCfUfgCfagau | 9641 | usCfsaAfaUfcUfgCfaGfuCfg |
| | | uugasusu | | AfgGfasusu |
| ETD01393 | 9745 | cscsucGfAfcuGfcAfgauu | 9642 | usGfscAfaAfuCfuGfcAfgUfc |
| | | ugcasusu | | GfaGfgsusu |
| ETD01394 | 9746 | csgsacuGfcAfGfauuugcu | 9643 | usGfsgAfgCfaAfaUfcUfgCfa |
| | | ccasusu | | GfuCfgsusu |
| ETD01395 | 9747 | csusgcagaUfUfugcuccaa | 9644 | usUfsuUfgGfaGfcAfaAfuCfu |
| | | aasusu | | GfcAfgsusu |
| ETD01396 | 9748 | usgscagaUfuUfgCfuccaa | 9645 | usUfsuUfuGfgAfgCfaAfaUfc |
| | | aaasusu | | UfgCfasusu |
| ETD01397 | 9749 | csasgaUfuUfgCfuCfcaaa | 9646 | usCfsgUfuUfuGfgAfgCfaAfa |
| | | acgasusu | | UfcUfgsusu |
| ETD01398 | 9750 | gsusggagCfgCfUfguugug | 9647 | usUfsuCfaCfaAfcAfgCfgCfu |
| | | aaasusu | | CfcAfcsusu |
| ETD01399 | 9751 | usgsgagCfgCfUfgUfugug | 9648 | usAfsuUfcAfcAfaCfaGfcGfc |
| | | aauasusu | | UfcCfasusu |
| ETD01400 | 9752 | csasagGfAfcAfGfcucaaa | 9649 | usAfsgUfuUfuGfaGfcUfgUfc |
| | | acuasusu | | CfuUfgsusu |
| ETD01401 | 9753 | usgsccccGfGfAfAfAfgac | 9650 | usCfsaAfaGfuCfuUfuCfcGfg |
| | | uuugasusu | | GfgCfasusu |
| ETD01402 | 9754 | gscscccgGfAfAfAfgacuu | 9651 | usAfscAfaAfgUfcUfuUfcCfg |
| | | uguasusu | | GfgGfcsusu |
| ETD01403 | 9755 | cscsccggAfAfAfGfAfcuu | 9652 | usUfsaCfaAfaGfuCfuUfuCfc |
| | | uguaasusu | | GfgGfgsusu |
| ETD01404 | 9756 | cscscgGfaAfAfGfAfcuuu | 9653 | usCfsuAfcAfaAfgUfcUfuUfc |
| | | guagasusu | | CfgGfgsusu |
| ETD01405 | 9757 | ususguaGfaGfGfaGfuuug | 9654 | usAfscUfcAfaAfcUfcCfuCfu |
| | | aguasusu | | AfcAfasusu |
| ETD01406 | 9758 | asgsccuCfaCfCfgugacua | 9655 | usGfsuUfaGfuCfaCfgGfuGfa |
| | | acasusu | | GfgCfususu |
| ETD01407 | 9759 | csuscaccGfuGfAfcuaaca | 9656 | usCfsaUfgUfuAfgUfcAfcGfg |
| | | ugasusu | | UfgAfgsusu |
| ETD01408 | 9760 | uscsaccGfuGfAfcuaacau | 9657 | usGfscAfuGfuUfaGfuCfaCfg |
| | | gcasusu | | GfuGfasusu |
| ETD01409 | 9761 | csasccgUfgaCfUfaacaug | 9658 | usGfsgCfaUfgUfuAfgUfcAfc |
| | | ccasusu | | GfgUfgsusu |
| ETD01410 | 9762 | usgscuGfAfuAfGfcAfgug | 9659 | usGfsuUfgCfaCfuGfcUfaUfc |
| | | caacasusu | | AfgCfasusu |
| ETD01411 | 9763 | gsuscuCfaCfuCfuugaagg | 9660 | usGfsgCfcUfuCfaAfgAfgUfg |
| | | ccasusu | | AfgAfcsusu |
| ETD01412 | 9764 | uscsacucuuGfaAfggccag | 9661 | usUfscUfgGfcCfuUfcAfaGfa |
| | | aasusu | | GfuGfasusu |
| ETD01413 | 9765 | usgsugCfUfggUfCfaaugg | 9662 | usGfsuCfcCfaUfuGfaCfcAfg |
| | | gacasusu | | CfaCfasusu |
| ETD01414 | 9766 | gsgsucAfauGfGfGfAfcug | 9663 | usCfsaCfuCfaGfuCfcCfaUfu |
| | | agugasusu | | GfaCfcsusu |
| ETD01415 | 9767 | uscsaauGfGfGfAfcugagu | 9664 | usGfsaCfaCfuCfaGfuCfcCfa |
| | | gucasusu | | UfuGfasusu |
| ETD01416 | 9768 | csasaugggaCfUfgaguguc | 9665 | usAfsgAfcAfcUfcAfgUfcCfc |
| | | uasusu | | AfuUfgsusu |
| ETD01417 | 9769 | gsascuGfaGfuGfucugcua | 9666 | usGfscUfaGfcAfgAfcAfcUfc |
| | | gcasusu | | AfgUfcsusu |
| ETD01418 | 9770 | gsasggGfGfcaGfcuuuuau | 9667 | usAfscAfuAfaAfaGfcUfgCfc |
| | | guasusu | | CfcUfcsusu |
| ETD01419 | 9771 | gscsagcUfUfUfUfaUfgug | 9668 | usGfsuGfgCfaCfaUfaAfaAfg |
| | | ccacasusu | | CfuGfcsusu |
| ETD01420 | 9772 | asgscuUfuUfaUfgUfgcca | 9669 | usGfsuGfuGfgCfaCfaUfaAfa |
| | | cacasusu | | AfgCfususu |
| ETD01421 | 9773 | gsasagaCfCfCfUfgUfcgu | 9670 | usUfsaGfcAfcGfaCfaGfgGfu |
| | | gcuaasusu | | CfuUfcsusu |
| ETD01422 | 9774 | asasgacccuGfucgugcuaa | 9671 | usUfsuAfgCfaCfgAfcAfgGfg |
| | | asusu | | UfcUfususu |
| ETD01423 | 9775 | csusaagCfaUfCfagcccca | 9672 | usGfsuUfgGfgGfcUfgAfuGfc |
| | | acasusu | | UfuAfgsusu |
| ETD01424 | 9776 | usasagcAfucAfGfccccaa | 9673 | usAfsgUfuGfgGfgCfuGfaUfg |
| | | cuasusu | | CfuUfasusu |
| ETD01425 | 9777 | csusguGfGfccAfGfcaucu | 9674 | usGfsuUfaGfaUfgCfuGfgCfc |
| | | aacasusu | | AfcAfgsusu |
| ETD01426 | 9778 | ascsuucAfGfcAfuGfgcac | 9675 | usUfsaAfgUfgCfcAfuGfcUfg |
| | | uuaasusu | | AfaGfususu |
| ETD01427 | 9779 | ususcaGfcauGfGfcacuua | 9676 | usAfscUfaAfgUfgCfcAfuGfc |
| | | guasusu | | UfgAfasusu |
| ETD01428 | 9780 | csasgcaUfggCfaCfuuagu | 9677 | usGfscAfcUfaAfgUfgCfcAfu |
| | | gcasusu | | GfcUfgsusu |
| ETD01429 | 9781 | csascuuAfGfuGfcugucau | 9678 | usGfsaAfuGfaCfaGfcAfcUfa |
| | | ucasusu | | AfgUfgsusu |
| ETD01430 | 9782 | usgscugUfcaUfUfccauga | 9679 | usCfsgUfcAfuGfgAfaUfgAfc |
| | | cgasusu | | AfgCfasusu |
| ETD01431 | 9783 | usgsucaUfUfCfCfaUfgac | 9680 | usGfscCfcGfuCfaUfgGfaAfu |
| | | gggcasusu | | GfaCfasusu |
| ETD01432 | 9784 | csasuuccAfuGfAfcgggcu | 9681 | usUfsaAfgCfcCfgUfcAfuGfg |
| | | uaasusu | | AfaUfgsusu |
| ETD01433 | 9785 | asusuccAfuGfAfcGfggcu | 9682 | usCfsuAfaGfcCfcGfuCfaUfg |
| | | uagasusu | | GfaAfususu |
| ETD01434 | 9786 | usgsagGfAfgcAfuGfccau | 9683 | usUfsuAfaUfgGfcAfuGfcUfc |
| | | uaaasusu | | CfuCfasusu |
| ETD01435 | 9787 | gscsaugCfCfaUfUfaaguu | 9684 | usUfscAfaAfcUfuAfaUfgGfc |
| | | ugaasusu | | AfuGfcsusu |
| ETD01436 | 9788 | usasuccuGfgGfuAfgagug | 9685 | usAfscCfaCfuCfuAfcCfcAfg |
| | | guasusu | | GfaUfasusu |
| ETD01437 | 9789 | usgsgucuucAfGfcuacugg | 9686 | usAfscCfaGfuAfgCfuGfaAfg |
| | | uasusu | | AfcCfasusu |
| ETD01438 | 9790 | csusagUfUfcUfUfccuccc | 9687 | usGfsuUfgGfgAfgGfaAfgAfa |
| | | aacasusu | | CfuAfgsusu |
| ETD01439 | 9791 | usascuCfgggCfuCfugacu | 9688 | usGfsuAfgUfcAfgAfgCfcCfg |
| | | acasusu | | AfgUfasusu |
| ETD01440 | 9792 | csascuuuGfGfAfGfuuguc | 9689 | usGfsuAfgAfcAfaCfuCfcAfa |
| | | uacasusu | | AfgUfgsusu |
| ETD01441 | 9793 | gsasgaAfuAfcAfuAfgacc | 9690 | usCfscUfgGfuCfuAfuGfuAfu |
| | | aggasusu | | UfcUfcsusu |
| ETD01442 | 9794 | asusagAfccAfGfGfcccag | 9691 | usAfsuUfcUfgGfgCfcUfgGfu |
| | | aauasusu | | CfuAfususu |
| ETD01443 | 9795 | gsgscccAfgAfAfucgaauc | 9692 | usUfsgGfaUfuCfgAfuUfcUfg |
| | | caasusu | | GfgCfcsusu |
| ETD01444 | 9796 | cscscagaaUfCfgaauccaa | 9693 | usAfsuUfgGfaUfuCfgAfuUfc |
| | | uasusu | | UfgGfgsusu |
| ETD01445 | 9797 | csasgaAfucgAfAfuccaau | 9694 | usAfscAfuUfgGfaUfuCfgAfu |
| | | guasusu | | UfcUfgsusu |
| ETD01446 | 9798 | asgsaaucgAfAfuccaaugu | 9695 | usCfsaCfaUfuGfgAfuUfcGfa |
| | | gasusu | | UfuCfususu |
| ETD01447 | 9799 | gsasauCfgaaUfCfcaaugu | 9696 | usGfscAfcAfuUfgGfaUfuCfg |
| | | gcasusu | | AfuUfcsusu |
| ETD01448 | 9800 | csgsaauccAfAfuGfugcca | 9697 | usGfsaUfgGfcAfcAfuUfgGfa |
| | | ucasusu | | UfuCfgsusu |
| ETD01449 | 9801 | gsasauCfCfaaUfgUfgcca | 9698 | usUfsgAfuGfgCfaCfaUfuGfg |
| | | ucaasusu | | AfuUfcsusu |
| ETD01450 | 9802 | csasaugUfgCfCfaUfcaag | 9699 | usUfsgAfcUfuGfaUfgGfcAfc |
| | | ucaasusu | | AfuUfgsusu |
| ETD01451 | 9803 | usgsugCfCfauCfaagucac | 9700 | usUfsaGfuGfaCfuUfgAfuGfg |
| | | uaasusu | | CfaCfasusu |
| ETD01452 | 9804 | gsusgccAfucAfAfgucacu | 9701 | usUfsuAfgUfgAfcUfuGfaUfg |
| | | aaasusu | | GfcAfcsusu |
| ETD01453 | 9805 | usgsccAfucAfAfgucacua | 9702 | usCfsuUfaGfuGfaCfuUfgAfu |
| | | agasusu | | GfgCfasusu |
| ETD01454 | 9806 | csasucaagUfCfaCfuaagu | 9703 | usCfsgAfcUfuAfgUfgAfcUfu |
| | | cgasusu | | GfaUfgsusu |
| ETD01455 | 9807 | uscsauuGfGfuAfucauguu | 9704 | usGfscAfaCfaUfgAfuAfcCfa |
| | | gcasusu | | AfuGfasusu |
| ETD01456 | 9808 | cscsuaUfaUfgUfgccacgg | 9705 | usCfsaCfcGfuGfgCfaCfaUfa |
| | | ugasusu | | UfaGfgsusu |
| ETD01457 | 9809 | csusauAfuGfuGfccacggu | 9706 | usUfscAfcCfgUfgGfcAfcAfu |
| | | gaasusu | | AfuAfgsusu |
| ETD01458 | 9810 | usasuaUfgUfgCfCfacggu | 9707 | usGfsuCfaCfcGfuGfgCfaCfa |
| | | gacasusu | | UfaUfasusu |
| ETD01459 | 9811 | asusaugugCfCfaCfgguga | 9708 | usGfsgUfcAfcCfgUfgGfcAfc |
| | | ccasusu | | AfuAfususu |
| ETD01460 | 9812 | asasguuuGfuGfcAfcaggg | 9709 | usGfsuCfcCfuGfuGfcAfcAfa |
| | | acasusu | | AfcUfususu |
| ETD01461 | 9813 | gsgsuggAfgcAfgAfuagug | 9710 | usGfsaCfaCfuAfuCfuGfcUfc |
| | | ucasusu | | CfaCfcsusu |
| ETD01462 | 9814 | asgsauagUfgUfcUfgcacu | 9711 | usGfscAfgUfgCfaGfaCfaCfu |
| | | gcasusu | | AfuCfususu |
| ETD01463 | 9815 | usgsggGfAfccAfuuaugug | 9712 | usUfsgCfaCfaUfaAfuGfgUfc |
| | | caasusu | | CfcCfasusu |
| ETD01464 | 9816 | gsgsgaccaUfUfaUfgugca | 9713 | usGfscUfgCfaCfaUfaAfuGfg |
| | | gcasusu | | UfcCfcsusu |
| ETD01465 | 9817 | cscsagCfaaCfCfuacauga | 9714 | usGfsuUfcAfuGfuAfgGfuUfg |
| | | acasusu | | CfuGfgsusu |

[0272] Any siRNA among any of subsets A-H may comprise any modification pattern described herein. If a sequence is a different number of nucleotides in length than a modification pattern, the modification pattern may still be used with the appropriate number of additional nucleotides added 5′ or 3′ to match the number of nucleotides in the modification pattern. For example, if a sense or antisense strand of the siRNA among any of subsets A-F comprises 19 nucleotides, and a modification pattern comprises 21 nucleotides, UU may be added onto the 5′ end of the sense or antisense strand.

### Example 3: Screening MST1R siRNAs for Activity in Human Cells in Culture

[0273] Chemically modified MST1R siRNAs cross reactive for human and non-human primate and derived from sequences in siRNA subset F (Table 8) will be assayed for MST1R mRNA knockdown activity in cells in culture. A-431 (ATCC® CRL-1555™) cells will be seeded in 96-well tissue culture plates at a cell density of 10,000 cells per well in DMEM (ATCC Catalog No. 30-2002) supplemented with 10% fetal bovine serum and incubated overnight in a water-jacketed, humidified incubator at 37° C. in an atmosphere composed of air plus 5% carbon dioxide. The MST1R siRNAs will be individually transfected into A-431 cells in duplicate wells at 10 nM final concentration using 0.15 μL Lipofectamine RNAiMax (Fisher) per well. Silencer Select Negative Control #1 (ThermoFisher, Catalog #4390843) will be transfected at 10 nM final concentration as a control. After incubation for 48 hours at 37° C., total RNA will be harvested from each well and cDNA prepared using TaqMan® Fast Advanced Cells-to-CT™ Kit (ThermoFisher, Catalog #A35374) according to the manufacturer's instructions. The level of MST1R mRNA from each well will be measured in triplicate by real-time qPCR on a QuantStudio™ 6 Pro Real-Time PCR System using TaqMan Gene Expression Assay for human MST1R (ThermoFisher, assay #Hs00899921_g1). The level of PPIA mRNA will be measured using TaqMan Gene Expression Assay (ThermoFisher, assay #Hs99999904_m1) and used to determine relative MST1R mRNA levels in each well using the delta-delta Ct method. All data will be normalized to relative MST1R mRNA levels in untreated A-431 cells.

### Example 4: Determining the IC50 of MST1R siRNAs

[0274] The IC50 values for knockdown of MST1R mRNA by select MST1R siRNAs will be determined in A-431 (ATCC® CRL-1555™) cells. The siRNAs will be assayed individually at 30 nM, 10 nM, 3 nM, 1 nM and 0.3 nM, or 3 nM, 1 nM, 0.3 nM, 0.1 nM and 0.03 nM, or 30 nM, 10 nM, 3 nM, 1 nM, 0.3 nM, 0.1 nM and 0.03 nM. The A-431 cells will be seeded in 96-well tissue culture plates at a cell density of 7,500 cells per well in DMEM (ATCC Catalog No. 30-2002) supplemented with 10% fetal bovine serum and incubated overnight in a water-jacketed, humidified incubator at 37° C. in an atmosphere composed of air plus 5% carbon dioxide. The MST1R siRNAs will be individually transfected into A-431 cells in triplicate wells using 0.15 μL Lipofectamine RNAiMax (Fisher) per well. After incubation for 48 hours at 37° C., total RNA will be harvested from each well and cDNA prepared using TaqMan® Fast Advanced Cells-to-CT™ Kit (ThermoFisher, Catalog #A35374) according to the manufacturer's instructions. The level of MST1R mRNA from each well will be measured in triplicate by real-time qPCR on a QuantStudio™ 6 Pro Real-Time PCR System using TaqMan Gene Expression Assay for human MST1R (ThermoFisher, assay #Hs00899921_g1). The level of PPIA mRNA will be measured using TaqMan Gene Expression Assay (ThermoFisher, assay #Hs99999904 ml) and used to determine relative MST1R mRNA levels in each well using the delta-delta Ct method. All data will be normalized to relative MST1R mRNA levels in untreated A-431 cells. Curve fit will be accomplish using the [inhibitor] vs. response (three parameters) function in GraphPad Prism software.

### Example 5: siRNA-Mediated Knockdown of MST1R in A549 Cell Line

[0275] siRNAs targeted to MST1R mRNA that downregulate levels of MST1R mRNA may lead to a decrease in AKT activation upon MST1 protein stimulation, when administered to the cultured human lung epithelial cell line, A549.

[0276] On Day 0, A549 cells are seeded at 150,000 cells/mL into a Falcon 24-well tissue culture plate (ThermoFisher Cat. No. 353047) at 0.5 mL per well.

[0277] On Day 1, MST1R siRNA and negative control siRNA master mixes are prepared. The MST1R siRNA master mix contains 350 μL of Opti-MEM (ThermoFisher Cat. No. 4427037—s1288 Lot No. AS02B02D) and 3.5 μL of a mixture of two MST1R siRNAs (10 μM stock). The negative control siRNA master mix contains 350 μL of Opti-MEM and 3.5 μL of negative control siRNA (ThermoFisher Cat. No. 4390843, 10 μM stock). Next, 3 μL of TransIT-X2 (Mirus Cat. No. MIR-6000) is added to each master mix. The mixes are incubated for 15 minutes to allow transfection complexes to form, then 51 μL of the appropriate master mix+TransIT-X2 is added to duplicate wells of A549 cells with a final siRNA concentration of 10 nM.

[0278] On Day 3, 48 hours post transfection, media containing MST1 protein is added and the cells are lysed 24 hrs after MST1 stimulation using the Cells-to-Ct kit according to the manufacturer's protocol (ThermoFisher Cat. No. 4399002). For the Cells-to-Ct, cells are washed with 50 μL using cold 1×PBS and lysed by adding 49.5 μL of Lysis Solution and 0.5 μL DNase I per well and pipetting up and down 5 times and incubating for 5 minutes at room temperature. The Stop Solution (5 μL/well) is added to each well and mixed by pipetting up and down five times and incubating at room temperature for 2 minutes. The reverse transcriptase reaction is performed using 22.5 μL of the lysate according to the manufacturer's protocol. Samples are stored at −80° C. until real-time qPCR is performed in triplicate using TaqMan Gene Expression Assays (Applied Biosystems FAM/MST1R using a BioRad CFX96 Cat. No. 1855195). For the protein quantification, equivalent quantities (30-50 μg) of protein are separated by 10% SDS polyacrylamide gels and transferred to polyvinylidene fluoride membranes. Membranes are blocked with 5% nonfat milk and incubated overnight with the appropriate primary antibody at dilutions specified by the manufacturer. Next, the membranes are washed three times in TBST and incubated with the corresponding horseradish peroxidase conjugated secondary antibody at 1:5,000 dilution for 1 hr. Bound secondary antibody is detected using an enhanced chemiluminescence system. The primary immunoblotting antibodies used are anti-MST1R, anti-AKT and anti-AKT-P (Abcam, Cambridge, UK).

[0279] A decrease in MST1R mRNA expression in the A549 cells is expected after transfection with the MST1R siRNAs compared to MST1R mRNA levels in A549 cells transfected with the non-specific control siRNA 72 hours after transfection. There is also an expected decrease in the amount of activated AKT, measured by quantifying the total amount of AKT protein relative to phosphorylated AKT (AKT-P) in A549 cells transfected with the MST1R siRNAs relative to the amount of MST1R RNA containing A549 cells transfected with a non-specific control siRNA 24 hours after MST1 stimulation. These results will show that MST1R siRNAs may elicit knockdown of MST1R mRNA in A549 cells and that decreased MST1R expression may correspond with a decrease in activated AKT.

### Example 6: ASO-Mediated Knockdown of MST1R in A549 Cell Line

[0280] ASOs targeted to MST1R mRNA that downregulate levels of MST1R mRNA may lead to a decrease in AKT activation upon MST1 protein stimulation, when administered to the cultured human lung epithelial cell line, A549.

[0281] On Day 0, A549 cells are seeded at 150,000 cells/mL into a Falcon 24-well tissue culture plate (ThermoFisher Cat. No. 353047) at 0.5 mL per well.

[0282] On Day 1, MST1R ASO and negative control ASO master mixes are prepared. The MST1R ASO master mix contains 350 μL of Opti-MEM (ThermoFisher Cat. No. 4427037—s1288 Lot No. AS02B02D) and 3.5 μL of a mixture of the MST1R ASOs (10 μM stock). The negative control ASO master mix contains 350 μL of Opti-MEM and 3.5 μL of negative control ASO (ThermoFisher Cat. No. 4390843, 10 μM stock). Next, 3 μL of TransIT-X2 (Mirus Cat. No. MIR-6000) is added to each master mix. The mixes are incubated for 15 minutes to allow transfection complexes to form, then 51 μL of the appropriate master mix+TransIT-X2 is added to duplicate wells of A549 cells with a final ASO concentration of 10 nM.

[0283] On Day 3, 48 hours post transfection, media containing MST1 protein is added and the cells are lysed 24 hrs after MST1 stimulation using the Cells-to-Ct kit according to the manufacturer's protocol (ThermoFisher Cat. No. 4399002). For the Cells-to-Ct, cells are washed with 50 μL using cold 1×PBS and lysed by adding 49.5 μL of Lysis Solution and 0.5 μL DNase I per well and pipetting up and down 5 times and incubating for 5 minutes at room temperature. The Stop Solution (5 μL/well) is added to each well and mixed by pipetting up and down five times and incubating at room temperature for 2 minutes. The reverse transcriptase reaction is performed using 22.5 μL of the lysate according to the manufacturer's protocol. Samples are stored at −80° C. until real-time qPCR is performed in triplicate using TaqMan Gene Expression Assays (Applied Biosystems FAM/MST1R using a BioRad CFX96 Cat. No. 1855195). For the protein quantification, equivalent quantities (30-50 μg) of protein are separated by 10% SDS polyacrylamide gels and transferred to polyvinylidene fluoride membranes. Membranes are blocked with 5% nonfat milk and incubated overnight with the appropriate primary antibody at dilutions specified by the manufacturer. Next, the membranes are washed three times in TBST and incubated with the corresponding horseradish peroxidase conjugated secondary antibody at 1:5,000 dilution for 1 hr. Bound secondary antibody is detected using an enhanced chemiluminescence system. The primary immunoblotting antibodies used are anti-MST1R, anti-AKT and anti-AKT-P (Abcam, Cambridge, UK).

[0284] A decrease in MST1R mRNA expression in the A549 cells is expected after transfection with the MST1R ASOs compared to MST1R mRNA levels in A549 cells transfected with the non-specific control ASO 72 hours after transfection. There is also an expected decrease in the amount of activated AKT, measured by quantifying the total amount of AKT protein relative to phosphorylated AKT (AKT-P) in A549 cells transfected with the MST1R ASOs relative to the amount of MST1R RNA containing A549 cells transfected with a non-specific control ASO 24 hours after MST1 stimulation. These results will show that the MST1R ASOs may elicit knockdown of MST1R mRNA in A549 cells and that decreased MST1R expression may correspond with a decrease in activated AKT.

### Example 7: Inhibition of MST1R in a Mouse Model of Lung Inflammation Via Acute Cigarette Smoke Exposure Using MST1R siRNAs or ASOs

[0285] In this experiment, a mouse model of lung inflammation induced by acute cigarette smoke exposure will be used to evaluate the effect of siRNA or ASO inhibition of MST1R. In this cigarette smoke induced model, mice are exposed to cigarette smoke for 3 hours which will result in a transient inflammatory response. Lung inflammation is assessed by measuring neutrophils and macrophages in bronchoalveolar lavage fluid and lung tissue.

[0286] Mice are divided into six groups: Group 1—a group treated with non-targeting control siRNA and cigarette smoke inhalation, Group 2—a group treated with non-targeting control ASO and cigarette smoke inhalation, Group 3—a group treated with MST1R siRNA1 and cigarette smoke inhalation, Group 4—a group treated with MST1R ASO1 and cigarette smoke inhalation, Group 5—a group treated with vehicle and cigarette smoke inhalation, Group 6—a group treated with vehicle and not receiving cigarette smoke stimulus. Each group contains eight mice (4 males, 4 females).

[0287] Administration of siRNA, ASO or vehicle is achieved with 10 μg/kg of siRNA or ASO suspended in 0.9% sodium chloride (Baxter Cat. No. JB1323) delivered via inhalation using a Lovelace nebulizer (model 01-100) at a flow rate of 1 liter/min. Restrained mice are treated for a total of 10 min. Group 1 mice receive non-targeting control siRNA, Group 2 mice receive non-targeting control ASO, Group 3 mice receive siRNA1 targeting mouse MST1R, Group 4 mice receive ASO1 targeting mouse MST1R, and Group 5 and 6 mice receive vehicle.

[0288] 24 hours after the smoke inhalation treatment, bronchoalveolar lavage fluid is collected and the mice are sacrificed by cervical dislocation following an intraperitoneal injection of 0.3 ml Nembutal (5 mg/ml) (Sigma Cat. No. 1507002). Final blood samples are collected, and livers and lungs are removed, and a section placed in RNAlater for mRNA isolation.

[0289] mRNA is isolated from tissue placed in RNAlater solution using the PureLink kit according to the manufacturer's protocol (ThermoFisher Cat. No. 12183020). The reverse transcriptase reaction is performed according to the manufacturer's protocol. Samples are stored at −80° C. until real-time qPCR is performed in triplicate using TaqMan Gene Expression Assays (Applied Biosystems FAM/MST1R using a BioRad CFX96 Cat. No. 1855195).

[0290] A decrease in MST1R mRNA expression in the lung tissue from mice dosed with the MST1R siRNA1 or ASO1 is expected compared to MST1R mRNA expression in lung tissue from mice dosed with the non-specific controls. There is an expected decrease in neutrophil and macrophage counts in the bronchoalveolar lavage fluid in cigarette smoke exposed mice that receive the MST1R siRNA or ASO compared to the neutrophil and macrophage counts in the bronchoalveolar lavage fluid in cigarette smoke exposed mice that receive the non-specific control. These results will show that the MST1R siRNA or ASO may elicit knockdown of MST1R mRNA in lung tissue and that the decrease in MST1R expression may correspond with a decrease in neutrophil and macrophage counts in the bronchoalveolar lavage fluid in mice exposed to cigarette smoke.

### Example 8: Inhibition of MST1R in a Mouse Model of COPD Using MST1R siRNAs or ASOs

[0291] In this experiment, a mouse model of cigarette smoke induced COPD will be used to evaluate the effect of siRNA or ASO inhibition of MST1R. In the cigarette smoke induced COPD model, mice are exposed to cigarette smoke for 6 months to mimic patients with a substantial history of cigarette smoking. Lung inflammation is assessed by measuring neutrophil and macrophage in bronchoalveolar lavage fluid and lung tissue. Lung function is also assessed by measuring tidal volume, resistance and dynamic compliance. Additionally, lung morphology and air space enlargement is assessed by fixing and staining the lungs and measuring structural parameters such as air space, septal wall thickness and mean linear intercept.

[0292] Mice are divided into six groups: Group 1—a group treated with non-targeting control siRNA and cigarette smoke inhalation, Group 2—a group treated with non-targeting control ASO and cigarette smoke inhalation, Group 3—a group treated with MST1R siRNA1 and cigarette smoke inhalation, Group 4—a group treated with MST1R ASO1 and cigarette smoke inhalation, Group 5—a group treated with vehicle and cigarette smoke inhalation, Group 6—a group treated with vehicle and not receiving cigarette smoke stimulus. Each group contains eight mice (4 males, 4 females).

[0293] Administration of siRNA, ASO or vehicle is achieved with 10 μg/kg of siRNA or ASO suspended in 0.9% sodium chloride (Baxter Cat. No. JB1323) delivered via inhalation using a Lovelace nebulizer (model 01-100) at a flow rate of 1 liter/min. Restrained mice are treated for a total of 10 min. Group 1 mice receive non-targeting control siRNA, Group 2 mice receive non-targeting control ASO, Group 3 mice receive siRNA1 targeting mouse MST1R, Group 4 mice receive ASO1 targeting mouse MST1R, and Group 5 and 6 mice receive vehicle. Every 7 days after the first administration animals from each group will be dosed for a total of 12 administrations.

[0294] 24 hours after the final smoke inhalation treatment, bronchoalveolar lavage fluid is collected and the mice are sacrificed by cervical dislocation following an intraperitoneal injection of 0.3 ml Nembutal (5 mg/ml) (Sigma Cat. No. 1507002). Final blood samples are collected, and livers and lungs are removed, and a section placed in RNAlater for mRNA isolation or fixed with paraformaldehyde and then embedded in paraffin for tissue sectioning.

[0295] mRNA is isolated from tissue placed in RNAlater solution using the PureLink kit according to the manufacturer's protocol (ThermoFisher Cat. No. 12183020). The reverse transcriptase reaction is performed according to the manufacturer's protocol. Samples are stored at −80° C. until real-time qPCR is performed in triplicate using TaqMan Gene Expression Assays (Applied Biosystems FAM/MST1R using a BioRad CFX96 Cat. No. 1855195).

[0296] A decrease in MST1R mRNA expression in the lung tissue from mice dosed with the MST1R siRNA1 or ASO1 is expected compared to MST1R mRNA expression in the lung tissue from mice dosed with the non-specific controls. There is an expected decrease in neutrophil and macrophage counts in the bronchoalveolar lavage fluid in cigarette smoke exposed mice that receive the MST1R siRNA or ASO compared to the neutrophil and macrophage counts in the bronchoalveolar lavage fluid in cigarette smoke exposed mice that receive the non-specific control. There is also an expected decrease in air space and mean linear intercept and an increase in septal wall thickness in cigarette smoke exposed mice that receive the MST1R siRNA or ASO compared to the air space, mean linear intercept and septal wall thickness in cigarette smoke exposed mice that receive the non-specific control. Additionally, there is also an expected decrease in compliance and tidal volume and an increase in resistance in cigarette smoke exposed mice that receive the MST1R siRNA or ASO compared to the compliance, tidal volume and resistance in cigarette smoke exposed mice that receive the non-specific control. These results will show that an MST1R siRNA or ASO may elicit knockdown of MST1R mRNA in lung and that the decrease in MST1R expression may correspond with a decrease in neutrophil and macrophage counts in the bronchoalveolar lavage fluid and increased lung function and decreased pathology in mice exposed to cigarette smoke.

### Example 9: Oligonucleotide Synthesis

[0297] Oligonucleotides such as siRNAs may be synthesized according to phosphoramidite technology on a solid phase. For example, a K&A oligonucleotide synthesizer may be used. Syntheses may be performed on a solid support made of controlled pore glass (CPG, 500 Å or 600 Å, obtained from AM Chemicals, Oceanside, CA, USA). All 2′-OMe and 2′-F phosphoramidites may be purchased from Hongene Biotech (Union City, CA, USA). All phosphoramidites may be dissolved in anhydrous acetonitrile (100 mM) and molecular sieves (3 Å) may be added. 5-Benzylthio-1H-tetrazole (BTT, 250 mM in acetonitrile) or 5-Ethylthio-1H-tetrazole (ETT, 250 mM in acetonitrile) may be used as activator solution. Coupling times may be 9-18 min (e.g. with a GalNAc such as ETL17), 6 min (e.g. with 2′OMe and 2′F). In order to introduce phosphorothioate linkages, a 100 mM solution of 3-phenyl 1,2,4-dithiazoline-5-one (POS, obtained from PolyOrg, Inc., Leominster, Mass., USA) in anhydrous acetonitrile may be employed.

[0298] After solid phase synthesis, the dried solid support may be treated with a 1:1 volume solution of 40 wt. % methylamine in water and 28% ammonium hydroxide solution (Aldrich) for two hours at 30° C. The solution may be evaporated and the solid residue may be reconstituted in water and purified by anionic exchange HPLC using a TKSgel SuperQ-5PW 13u column. Buffer A may be 20 mM Tris, 5 mM EDTA, pH 9.0 and contained 20% Acetonitrile and buffer B may be the same as buffer A with the addition of 1 M sodium chloride. UV traces at 260 nm may be recorded. Appropriate fractions may be pooled then desalted using Sephadex G-25 medium.

[0299] Equimolar amounts of sense and antisense strand may be combined to prepare a duplex. The duple solution may be prepared in 0.1×PBS (Phosphate-Buffered Saline, 1×, Gibco). The duplex solution may be annealed at 95° C. for 5 min, and cooled to room temperature slowly. Duplex concentration may be determined by measuring the solution absorbance on a UV-Vis spectrometer at 260 urn in 0.1×PBS, For some experiments, a conversion factor may be calculated from an experimentally determined extinction coefficient.

### Example 10: GalNAc Ligand for Hepatocyte Targeting of Oligonucleotides

[0300] Without limiting the disclosure to these individual methods, there are at least two general methods for attachment of multivalent N-acetylgalactosamine (GalNAc) ligands to oligonucleotides: solid or solution-phase conjugations. GalNAc ligands may be attached to solid phase resin for 3′ conjugation or at the 5′ terminus using GalNAc phosphoramidite reagents. GalNAc phosphoramidites may be coupled on solid phase as for other nucleosides in the oligonucleotide sequence at any position in the sequence. Reagents for GalNAc conjugation to oligonucleotides are shown in Table 11.

TABLE 11
GalNAc Conjugation Reagents

| Type of | |
|---|---|
| conjugation | Structure |
| Solid phase 3′ attachment where squiggly line is rest of oligonucleotide chain and right-most OH is where attachment to solid phase is. | [chemical structure] |
| | This GalNAc ligand may be referred to as “GalNAc23” or “GalNAc#23.” |
| Solid phase 5′ attachment phosphoramidite | [chemical structure] |
| Solid phase 5′ attachment Phosphoramidite | [chemical structure] |
| Solution phase Carboxylic acid for amide coupling anywhere on oligonucleotide | [chemical structure] |
| | Where Ac is an acetyl group or other hydroxyl protecting group that can be removed |
| | under basic, acid or reducing conditions. |

[0301] In solution phase conjugation, the oligonucleotide sequence-including a reactive conjugation site—is formed on the resin. The oligonucleotide is then removed from the resin and GalNAc is conjugated to the reactive site.

[0302] The carboxy GalNAc derivatives may be coupled to amino-modified oligonucleotides. The peptide coupling conditions are known to the skilled in the art using a carbodiimide coupling agent like DCC (N,N′-Dicyclohexylcarbodiimide), EDC (N-(3-dimethylaminopropyl)-N′-ethylcarbodiimide) or EDC·HCl (N-(3-dimethylaminopropyl)-N′-ethylcarbodiimide hydrochloride and an additive like HOBt (1-hydroxybenztriazole), HOSu (N-hydroxysuccinimide), TBTU (N,N,N′,N′-Tetramethyl-O-(benzotriazol-1-yl)uronium tetrafluoroborate, HBTU (2-(1H-benzotriazol-1-yl)-1,1,3,3-tetramethyluronium hexafluorophosphate) or HOAt (1-Hydroxy-7-azabenzotriazole and common combinations thereof such as TBTU/HOBt or HBTU/HOAt to form activated amine-reactive esters.

[0303] Amine groups may be incorporated into oligonucleotides using a number of known, commercially available reagents at the 5′ terminus, 3′ terminus or anywhere in between.

[0304] Non-limiting examples of reagents for oligonucleotide synthesis to incorporate an amino group include:
[0305] 5′ attachment:
[0306] 6-(4-Monomethoxytritylamino)hexyl-(2-cyanoethyl)-(N,N-diisopropyl)-phosphoramidite CAS Number: 114616-27-2
[0307] 5′-Amino-Modifier TEG CE-Phosphoramidite
[0308] 10-(O-trifluoroacetamido-N-ethyl)-triethyleneglycol-1-[(2-cyanoethyl)-(N,N-diisopropyl)]-phosphoramidite
[0309] 3′ attachment:
[0310] 3′-Amino-Modifier Serinol CPG
[0311] 3-Dimethoxytrityloxy-2-(3-(fluorenylmethoxycarbonylamino)propanamido)propyl-1-O-succinyl-long chain alkylamino-CPG (where CPG stands for controlled-pore glass and is the solid support)
[0312] Amino-Modifier Serinol Phosphoramidite
[0313] 3-Dimethoxytrityloxy-2-(3-(fluorenylmethoxycarbonylamino)propanamido)propyl-1-O-(2-cyanoethyl)-(N,N-diisopropyl)-phosphoramidite

### Internal (Base Modified):

[0314] Amino-Modifier C6 dT
[0315] 5′-Dimethoxytrityl-5-[N-(trifluoroacetylaminohexyl)-3-acrylimido]-2′-deoxyUridine,3′-[(2-cyanoethyl)-(N,N-diisopropyl)]-phosphoramidite. CAS Number: 178925-21-8

[0316] Solution phase conjugations may occur after oligonucleotide synthesis via reactions between non-nucleosidic nucleophilic functional groups that are attached to the oligonucleotide and electrophilic GalNAc reagents. Examples of nucleophilic groups include amines and thiols, and examples of electrophilic reagents include activated esters (e.g. N-hydroxysuccinimide, pentafluorophenyl) and maleimides.

### Example 11: GalNAc Ligands for Hepatocyte Targeting of Oligonucleotides

[0317] Without limiting the disclosure to these individual methods, there are at least two general methods for attachment of multivalent N-acetylgalactosamine (GalNAc) ligands to oligonucleotides: solid or solution-phase conjugations. GalNAc ligands may be attached to solid phase resin for 3′ conjugation or at the 5′ terminus using GalNAc phosphoramidite reagents. GalNAc phosphoramidites may be coupled on solid phase as for other nucleosides in the oligonucleotide sequence at any position in the sequence. A non-limiting example of a phosphoramidite reagent for GalNAc conjugation to a 5′ end oligonucleotide is shown in Table 12.

TABLE 12
GalNAc Conjugation Reagent

| Type of | |
|---|---|
| conjugation | Structure |
| Solid phase 5′ attachment phosphor- amidite | [chemical structure] |

[0318] The following includes examples of synthesis reactions used to create a GalNAc moiety:

### Scheme for the Preparation of NAcegal-Linker-TMSOTf

[chemical structure]

[chemical structure]

### General Procedure for Preparation of Compound 2A

[chemical structure]

[0319] To a solution of Compound 1A (500 g, 4.76 mol, 476 mL) in 2-Methly-THF (2.00 L) is added CbzCl (406 g, 2.38 mol, 338 mL) in 2-Methyl-THF (750 mL) dropwise at 0° C. The mixture is stirred at 25° C. for 2 hrs under N₂ atmosphere. TLC (DCM:MeOH=20:1, PMA) may indicate CbzCl is consumed completely and one new spot (R_{f}=0.43) formed. The reaction mixture is added HCl/EtOAc (1 N, 180 mL) and stirred for 30 mins, white solid is removed by filtration through celite, the filtrate is concentrated under vacuum to give Compound 2A (540 g, 2.26 mol, 47.5% yield) as a pale yellow oil and used into the next step without further purification. ¹H NMR: δ 7.28-7.41 (m, 5H), 5.55 (br s, 1H), 5.01-5.22 (m, 2H), 3.63-3.80 (m, 2H), 3.46-3.59 (m, 4H), 3.29-3.44 (m, 2H), 2.83-3.02 (m, 1H).

### General Procedure for Preparation of Compound 4A

[chemical structure]

[0320] To a solution of Compound 3A (1.00 kg, 4.64 mol, HCl) in pyridine (5.00 L) is added acetyl acetate (4.73 kg, 46.4 mol, 4.34 L) dropwise at 0° C. under N₂ atmosphere. The mixture is stirred at 25° C. for 16 hrs under N₂ atmosphere. TLC (DCM:MeOH=20:1, PMA) indicated Compound 3A is consumed completely and two new spots (R_{f}=0.35) formed. The reaction mixture is added to cold water (30.0 L) and stirred at 0° C. for 0.5 hr, white solid formed, filtered and dried to give Compound 4A (1.55 kg, 3.98 mol, 85.8% yield) as a white solid and used in the next step without further purification. ¹H NMR: δ 7.90 (d, J=9.29 Hz, 1H), 5.64 (d, J=8.78 Hz, 1H), 5.26 (d, J=3.01 Hz, 1H), 5.06 (dd, J=11.29, 3.26 Hz, 1H), 4.22 (t, J=6.15 Hz, 1H), 3.95-4.16 (m, 3H), 2.12 (s, 3H), 2.03 (s, 3H), 1.99 (s, 3H), 1.90 (s, 3H), 1.78 (s, 3H).

### General Procedure for Preparation of Compound 5A

[chemical structure]

[0321] To a solution of Compound 4A (300 g, 771 mmol) in DCE (1.50 L) is added TMSOTf (257 g, 1.16 mol, 209 mL) and stirred for 2 hrs at 60° C., and then stirred for 1 hr at 25° C. Compound 2A (203 g, 848 mmol) is dissolved in DCE (1.50 L) and added 4 Å powder molecular sieves (150 g) stirring for 30 mins under N₂ atmosphere. Then the solution of Compound 4A in DCE is added dropwise to the mixture at 0° C. The mixture is stirred at 25° C. for 16 hrs under N₂ atmosphere. TLC (DCM:MeOH=25:1, PMA) indicated Compound 4A is consumed completely and new spot (R_{f}=0.24) formed. The reaction mixture is filtered and washed with sat. NaHCO₃ (2.00 L), water (2.00 L) and sat. brine (2.00 L). The organic layer is dried over anhydrous Na₂SO₄, filtered and concentrated under reduced pressure to give a residue. The residue is triturated with 2-Me-THE/heptane (5/3, v/v, 1.80 L) for 2 hrs, filtered and dried to give Compound 5A (225 g, 389 mmol, 50.3% yield, 98.4% purity) as a white solid. ¹H NMR: δ 7.81 (d, J 9.29 Hz, 1H), 7.20-7.42 (m, 6H), 5.21 (d, J=3.26 Hz, 1H), 4.92-5.05 (m, 3H), 4.55 (d, J=8.28 Hz, 1H), 3.98-4.07 (m, 3H), 3.82-3.93 (m, 1H), 3.71-3.81 (m, 1H), 3.55-3.62 (m, 1H), 3.43-3.53 (m, 2H), 3.37-3.43 (m, 2H), 3.14 (q, J=5.77 Hz, 2H), 2.10 (s, 3H), 1.99 (s, 3H), 1.89 (s, 3H), 1.77 (s, 3H).

### General Procedure for Preparation of NAcegal-Linker-Tosylate Salt

[chemical structure]

[0322] To a solution of Compound 5A (200 g, 352 mmol) in THF (1.0 L) is added dry Pd/C (15.0 g, 10% purity) and TsOH (60.6 g, 352 mmol) under N₂ atmosphere. The suspension is degassed under vacuum and purged with H₂ several times. The mixture is stirred at 25° C. for 3 hrs under H₂ (45 psi) atmosphere. TLC (DCM:MeOH=10:1, PMA) indicated Compound 5A is consumed completely and one new spot (R_{f}=0.04) is formed. The reaction mixture is filtered and concentrated (≤40° C.) under reduced pressure to give a residue. Diluted with anhydrous DCM (500 mL, dried overnight with 4 Å molecular sieves (dried at 300° C. for 12 hrs)) and concentrate to give a residue and run Karl Fisher (KF) to check for water content. This is repeated 3 times with anhydrous DCM (500 mL) dilutions and concentration to give NAcegal-Linker-TMSOTf (205 g, 95.8% yield, TsOH salt) as a foamy white solid. ¹H NMR: δ 7.91 (d, J 9.03 Hz, 1H), 7.53-7.86 (m, 2H), 7.49 (d, J=8.03 Hz, 2H), 7.13 (d, J=8.03 Hz, 2H), 5.22 (d, J 3.26 Hz, 1H), 4.98 (dd, J=11.29, 3.26 Hz, 1H), 4.57 (d, J=8.53 Hz, 1H), 3.99-4.05 (m, 3H), 3.87-3.94 (m, 1H), 3.79-3.85 (m, 1H), 3.51-3.62 (m, 5H), 2.96 (br t, J=5.14 Hz, 2H), 2.29 (s, 3H), 2.10 (s, 3H), 2.00 (s, 3H), 1.89 (s, 3H), 1.78 (s, 3H).

### Scheme for the Preparation of TRIS-PEG2-CBZ

[chemical structure]

### General Procedure for Preparation of Compound 5B

[chemical structure]

[0323] To a solution of Compound 4B (400 g, 1.67 mol, 1.00 eq) and NaOH (10 M, 16.7 mL, 0.10 eq) in THF (2.00 L) is added Compound 4B_2 (1.07 kg, 8.36 mol, 1.20 L, 5.00 eq), the mixture is stirred at 30° C. for 2 hrs. LCMS showed the desired MS is given. Five batches of solution are combined to one batch, then the mixture is diluted with water (6.00 L), extracted with ethyl acetate (3.00 L*3), the combined organic layer is washed with brine (3.00 L), dried over Na₂SO₄, filtered and concentrated under vacuum. The crude is purified by column chromatography (SiO₂, petroleum ether:ethyl acetate=100:1-10:1, R_{f}=0.5) to give Compound 5B (2.36 kg, 6.43 mol, 76.9% yield) as light yellow oil. HNMR: δ 7.31-7.36 (m, 5H), 5.38 (s, 1H), 5.11-5.16 (m, 2H), 3.75 (t, J=6.4 Hz), 3.54-3.62 (m, 6H), 3.39 (d, J=5.2 Hz), 2.61 (t, J=6.0 Hz).

### General procedure for preparation of 3-oxo-1-phenyl-2,7,10-trioxa-4-azatridecan-13-oic acid (Compound 2B below)

[chemical structure]

[0324] To a solution of Compound 5B (741 g, 2.02 mol, 1.00 eq) in DCM (2.80 L) is added TFA (1.43 kg, 12.5 mol, 928 mL, 6.22 eq), the mixture is stirred at 25° C. for 3 hrs. LCMS showed the desired MS is given. The mixture is diluted with DCM (5.00 L), washed with water (3.00 L*3), brine (2.00 L), the combined organic layer is dried over Na₂SO₄, filtered and concentrated under vacuum to give Compound 2B (1800 g, crude) as light yellow oil. HNMR: δ 9.46 (s, 5H), 7.27-7.34 (m, 5H), 6.50-6.65 (m, 1H), 5.71 (s, 1H), 5.10-5.15 (m, 2H), 3.68-3.70 (m, 14H), 3.58-3.61 (m, 6H), 3.39 (s, 2H), 2.55 (s, 6H), 2.44 (s, 2H).

### General Procedure for Preparation of Compound 3B

[chemical structure]

[0325] To a solution of Compound 2B (375 g, 999 mmol, 83.0% purity, 1.00 eq) in DCM (1.80 L) is added HATU (570 g, 1.50 mol, 1.50 eq) and DIEA (258 g, 2.00 mol, 348 mL, 2.00 eq) at 0° C., the mixture is stirred at 0° C. for 30 min, then Compound 1B (606 g, 1.20 mol, 1.20 eq) is added, the mixture is stirred at 25° C. for 1 hr. LCMS showed desired MS is given. The mixture is combined to one batch, then the mixture is diluted with DCM (5.00 L), washed with 1 N HCl aqueous solution (2.00 L*2), then the organic layer is washed with saturated Na₂CO₃ aqueous solution (2.00 L*2) and brine (2.00 L), the organic layer is dried over Na₂SO₄, filtered and concentrated under vacuum to give Compound 3B (3.88 kg, crude) as yellow oil.

### General Procedure for Preparation of TRIS-PEG2-CBZ.

[chemical structure]

[0326] A solution of Compound 3B (775 g, 487 mmol, 50.3% purity, 1.00 eq) in HCl/dioxane (4 M, 2.91 L, 23.8 eq) is stirred at 25° C. for 2 hrs. LCMS showed the desired MS is given. The mixture is concentrated under vacuum to give a residue. Then the combined residue is diluted with DCM (5.00 L), adjusted to pH=8 with 2.5 M NaOH aqueous solution, and separated. The aqueous phase is extracted with DCM (3.00 L) again, then the aqueous solution is adjusted to pH=3 with 1 N HCl aqueous solution, then extracted with DCM (5.00 L*2), the combined organic layer is washed with brine (3.00 L), dried over Na₂SO₄, filtered and concentrated under vacuum. The crude is purified by column chromatography (SiO₂, DCM:MeOH=0:1-12:1, 0.1% HOAc, R_{f}=0.4). The residue is diluted with DCM (5.00 L), adjusted to pH=8 with 2.5 M NaOH aqueous solution, separated, the aqueous solution is extracted with DCM (3.00 L) again, then the aqueous solution is adjusted to pH=3 with 6 N HCl aqueous solution, extracted with DCM:MeOH=10:1 (5.00 L*2), the combined organic layer is washed with brine (2.00 L), dried over Na₂SO₄, filtered and concentrated under vacuum to give a residue. Then the residue is diluted with MeCN (5.00 L), concentrated under vacuum, repeat this procedure twice to remove water to give TRIS-PEG2-CBZ (1.25 kg, 1.91 mol, 78.1% yield, 95.8% purity) as light yellow oil. ¹HNMR: 400 MHz, MeOD, δ 7.30-7.35 (5H), 5.07 (s, 2H), 3.65-3.70 (m, 16H), 3.59 (s, 4H), 3.45 (t, J=5.6 Hz), 2.51 (t, J=6.0 Hz), 2.43 (t, 6.4 Hz).

### Scheme for the Preparation of TriNGal-TRIS-Peg2-Phosph 8c

[chemical structure]

[chemical structure]

[chemical structure]

### General Procedure for Preparation of Compound 3C

[chemical structure]

[0327] To a solution of Compound 1C (155 g, 245 mmol, 1.00 eq) in ACN (1500 mL) is added TBTU (260 g, 811 mmol, 3.30 eq), DIEA (209 g, 1.62 mol, 282 mL, 6.60 eq) and Compound 2C (492 g, 811 mmol, 3.30 eq, TsOH) at 0° C., the mixture is stirred at 15° C. for 16 hrs. LCMS showed the desired MS is given. The mixture is concentrated under vacuum to give a residue, then the mixture is diluted with DCM (2000 mL), washed with 1 N HCl aqueous solution (700 mL*2), then saturated NaHCO₃ aqueous solution (700 mL*2) and concentrated under vacuum. The crude is purified by column chromatography to give Compound 3C (304 g, 155 mmol, 63.1% yield, 96.0% purity) as a yellow solid.

### General Procedure for Preparation of Compound 4C

[chemical structure]

[0328] Two batches solution of Compound 3C (55.0 g, 29.2 mmol, 1.00 eq) in MeOH (1600 mL) is added Pd/C (6.60 g, 19.1 mmol, 10.0% purity) and TFA (3.34 g, 29.2 mmol, 2.17 mL, 1.00 eq), the mixture is degassed under vacuum and purged with H₂. The mixture is stirred under H₂ (15 psi) at 15° C. for 2 hours. LCMS showed the desired MS is given. The mixture is filtered and the filtrate is concentrated under vacuum to give Compound 4C (106 g, 54.8 mmol, 93.7% yield, 96.2% purity, TFA) as a white solid.

### General Procedure for Preparation of Compound 5C

[chemical structure]

[0329] Two batches in parallel. To a solution of EDCI (28.8 g, 150 mmol, 1.00 eq) in DCM (125 mL) is added compound 4a (25.0 g, 150 mmol, 1.00 eq) dropwise at 0° C., then the mixture is added to compound 4 (25.0 g, 150 mmol, 1.00 eq) in DCM (125 mL) at 0° C., then the mixture is stirred at 25° C. for 1 hr. TLC (Petroleum ether:Ethyl acetate=3:1, R_{f}=0.45) showed the reactant is consumed and one new spot is formed. The reaction mixture is diluted with DCM (100 mL) then washed with aq·NaHCO₃ (250 mL*1) and brine (250 mL), dried over Na₂SO₄, filtered and concentrated under reduced pressure to give a residue. The residue is purified by column chromatography (SiO₂, Petroleum ether:Ethyl acetate=100:1 to 3:1), TLC (SiO₂, Petroleum ether:Ethyl acetate=3:1), R_{f}=0.45, then concentrated under reduced pressure to give a residue. Compound 5C (57.0 g, 176 mmol, 58.4% yield, 96.9% purity) is obtained as colorless oil and confirmed ¹HNMR: EW33072-2-P1A, 400 MHz, DMSO δ 9.21 (s, 1H), 7.07-7.09 (m, 2H), 6.67-6.70 (m, 2H), 3.02-3.04 (m, 2H), 2.86-2.90 (m, 2H)

### General Procedure for Preparation of Compound 6

[chemical structure]

[0330] To a mixture of compound 3 (79.0 g, 41.0 mmol, 96.4% purity, 1.00 eq, TFA) and compound 6C (14.2 g, 43.8 mmol, 96.9% purity, 1.07 eq) in DCM (800 mL) is added TEA (16.6 g, 164 mmol, 22.8 mL, 4.00 eq) dropwise at 0° C., the mixture is stirred at 15° C. for 16 hrs. LCMS (EW33072-12-P1B, Rt=0.844 min) showed the desired mass is detected. The reaction mixture is diluted with DCM (400 mL) and washed with aq·NaHCO₃ (400 mL*1) and brine (400 mL*1), then the mixture is diluted with DCM (2.00 L) and washed with 0.7 M Na₂CO₃ (1000 mL*3) and brine (800 mL*3), dried over Na₂SO₄, filtered and concentrated under reduced pressure to give a residue. The residue is used to next step directly without purification. Compound 6 (80.0 g, crude) is obtained as white solid and confirmed via ¹HNMR: EW33072-12-P1A, 400 MHz, MeOD δ 7.02-7.04 (m, 2H), 6.68-6.70 (m, 2H), 5.34-5.35 (s, 3H), 5.07-5.08 (d, J=4.00 Hz, 3H), 4.62-4.64 (d, J=8.00 Hz, 3H), 3.71-4.16 (m, 16H), 3.31-3.70 (m, 44H), 2.80-2.83 (m, 2H), 2.68 (m, 2H), 2.46-2.47 (m, 10H), 2.14 (s, 9H), 2.03 (s, 9H), 1.94-1.95 (d, J=4.00 Hz, 18H).

### General Procedure for Preparation of TriGNal-TRIS-Peg2-Phosph 8c

[chemical structure]

[0331] Two batches are synthesized in parallel. To a solution of compound 6C (40.0 g, 21.1 mmol, 1.00 eq in DCM (600 mL) is added diisopropylammonium tetrazolide (3.62 g, 21.1 mmol, 1.00 eq) and compound 7c (6.37 g, 21.1 mmol, 6.71 mL, 1.00 eq) in DCM (8.00 mL) drop-wise, the mixture is stirred at 30° C. for 1 hr, then added compound 7c (3.18 g, 10.6 mmol, 3.35 mL, 0.50 eq) in DCM (8.00 mL) drop-wise, the mixture is stirred at 30° C. for 30 mins, then added compound 7c (3.18 g, 10.6 mmol, 3.35 mL, 0.50 eq) in DCM (8.00 mL) drop-wise, the mixture is stirred at 30° C. for 1.5 hrs. LCMS (EW33072-17-P1C1, Rt=0.921 min) showed the desired MS+1 is detected. LCMS (EW33072-17-P1C2, Rt=0.919 min) showed the desired MS+1 is detected. Two batches are combined for work-up. The mixture is diluted with DCM (1.20 L), washed with saturated NaHCO₃ aqueous solution (1.60 L*2), 3% DMF in H₂O (1.60 L*2), H₂O (1.60 L*3), brine (1.60 L), dried over Na₂SO₄, filtered and concentrated under reduced pressure to give a residue. The residue is purified by column chromatography (SiO₂, DCM:MeOH:TEA=100:3:2) TLC (SiO₂, DCM:MeOH=10:1, R_{f}=0.45), then concentrated under reduced pressure to give a residue. Compound 8C (76.0 g, 34.8 mmol, 82.5% yield, 96.0% purity) is obtained as white solid and confirmed via ¹HNMR: EW33072-19-P1C, 400 MHz, MeOD δ 7.13-7.15 (d, J=8.50 Hz, 2H), 6.95-6.97 (dd, J=8.38, 1.13 Hz, 2H), 5.34 (d, J=2.88 Hz, 3H), 0.09 (dd, J=11.26, 3.38 Hz, 3H), 4.64 (d, J=8.50 Hz, 3H), 3.99-4.20 (m, 12H), 3.88-3.98 (m, 5H), 3.66-3.83 (m, 20H), 3.51-3.65 (m, 17H), 3.33-3.50 (m, 9H), 2.87 (t, J=7.63 Hz, 2H), 2.76 (t, J=5.94 Hz, 2H), 2.42-2.50 (m, 10H), 2.14 (s, 9H), 2.03 (s, 9H), 1.94-1.95 (d, J=6.13 Hz, 18H), 1.24-1.26 (d, J=6.75 Hz, 6H), 1.18-1.20 (d, J=6.75 Hz, 6H)

### Example 12: Modification Motif 1

[0332] An example MST1R siRNA includes a combination of the following modifications:
[0333] Position 9 (from 5′ to 3′) of the sense strand is 2′ F.
[0334] If position 9 is a pyrimidine then all purines in the Sense Strand are 2′OMe, and 1-5 pyrimidines between positions 5 and 11 are 2′ F provided that there are never three 2′F modifications in a row.
[0335] If position 9 is a purine then all pyrimidines in the Sense Strand are 2′OMe, and 1-5 purines between positions 5 and 11 are 2′ F provided that there are never three 2′F modifications in a row.
[0336] Antisense strand odd-numbered positions are 2′OMe and even-numbered positions are a mixture of 2′ F, 2′OMe and 2′ deoxy.

### Example 13: Modification Motif 2

[0337] An example MST1R siRNA includes a combination of the following modifications:
[0338] Position 9 (from 5′ to 3′) of the sense strand is 2′ deoxy.
[0339] Sense strand positions 5, 7 and 8 are 2′ F.
[0340] All pyrimidines in positions 10-21 are 2′OMe, and purines are a mixture of 2′OMe and 2′ F. Alternatively, all purines in positions 10-21 are 2′OMe and all pyrimidines in positions 10-21 are a mixture of 2′OMe and 2′ F.
[0341] Antisense strand odd-numbered positions are 2′OMe and even-numbered positions are a mixture of 2′F, 2′OMe and 2′ deoxy.

[0342] While preferred embodiments of the present invention have been shown and described herein, it will be obvious to those skilled in the art that such embodiments are provided by way of example only. Numerous variations, changes, and substitutions will now occur to those skilled in the art without departing from the invention. It should be understood that various alternatives to the embodiments of the invention described herein may be employed in practicing the invention. It is intended that the following claims define the scope of the invention and that methods and compositions within the scope of these claims and their equivalents be covered thereby.

### IV. SEQUENCE INFORMATION

[0343] Some embodiments include one or more nucleic acid sequences as described in Table 13:

TABLE 13
Sequence Information

| SEQ ID | |
|---|---|
| NO: | Description |
| 1-4754 | MST1R siRNA sense strand sequences |
| 4755-9508 | MST1R siRNA antisense strand sequences |
| 9509-9611 | Base sequences of modified MST1R siRNA sense strand |
| | sequences |
| 9612-9714 | Base sequences of modified MST1R siRNA antisense |
| | strand sequences |
| 9715-9817 | Base sequences of alternatively modified MST1R siRNA |
| | sense strand sequences |
| 9818 | Full-length human MST1R mRNA sequence (Ensembl |
| | transcript ID: ENST00000296474.8) (human RNA) |
| 9819-9836 | Modification patterns 1S to 9S, 1AS to 8AS, and ASO1 |
| 9837-9839 | Examples of RGD peptide sequences |

1. A composition comprising an oligonucleotide that targets MST1R and when administered to a subject in an effective amount improves:
(a) a lung function measurement;
(b) a leukocyte measurement;
(c) a chronic obstructive pulomonary disease (COPD) symptom or exacerbation measurement; or
(d) an asthma symptom or exacerbation measurement.

2. The composition of claim 1, wherein the lung function measurement comprises a forced expiratory volume in 1 second (FEV1) measurement, a forced expiratory volume in 1 second percent predicted (FEV1pp) measurement, a forced vital capacity (FVC) measurement, a FEV1/FVC ratio measurement, a forced expiratory volume, or a peak expiratory flow measurement.

3-10. (canceled)

11. The composition of claim 1, wherein the oligonucleotide comprises a modified internucleoside linkage.

12. The composition of claim 11, wherein the modified internucleoside linkage comprises alkylphosphonate, phosphorothioate, methylphosphonate, phosphorodithioate, alkylphosphonothioate, phosphoramidate, carbamate, carbonate, phosphate triester, acetamidate, or carboxymethyl ester, or a combination thereof.

13. (canceled)

14. The composition of claim 1, wherein the oligonucleotide comprises 1, 2, 3, 4, 5, 6, 7, 8, 9, 10, 11, 12, 13, 14, 15, 16, 17, 18, 19, or 20 modified internucleoside linkages.

15. The composition of claim 1, wherein the oligonucleotide comprises a modified nucleoside.

16. The composition of claim 15, wherein the modified nucleoside comprises a locked nucleic acid (LNA), hexitol nucleic acid (HNA), cyclohexene nucleic acid (CeNA), 2′-O-methoxyethyl, 2′-O-alkyl, 2′-O-allyl, 2′-fluoro, or 2′-deoxy, 2′-O-methyl nucleoside, 2′-deoxyfluoro nucleoside, 2′-O—N-methylacetamido (2′-O-NMA) nucleoside, a 2′-O-dimethylaminoethoxyethyl (2′-O-DMAEOE) nucleoside, 2′-O-aminopropyl (2′-O-AP) nucleoside, or 2′-ara-F, or a combination thereof.

17-21. (canceled)

22. The composition of claim 1, wherein the oligonucleotide comprises 1, 2, 3, 4, 5, 6, 7, 8, 9, 10, 11, 12, 13, 14, 15, 16, 17, 18, 19, 20, or 21 modified nucleosides.

23. The composition of claim 1, wherein the oligonucleotide comprises a lipid, a sugar moiety, or an integrin targeting ligand attached at a 3′ or 5′ terminus of the oligonucleotide.

24. The composition of claim 23, wherein the lipid comprises cholesterol, myristoyl, palmitoyl, stearoyl, lithocholoyl, docosanoyl, docosahexaenoyl, myristyl, palmityl stearyl, or α-tocopherol, or a combination thereof.

25. (canceled)

26. The composition of claim 23, wherein the integrin comprises integrin alpha-v-beta-6 or the integrin targeting ligand comprises an arginine-glycine-aspartic acid (RGD) peptide.

27. (canceled)

28. The composition of claim 1, wherein the oligonucleotide comprises a small interfering RNA (siRNA) comprising a sense strand and an antisense strand, and each strand is independently 12-30 nucleosides in length.

29. (canceled)

30. (canceled)

31. A composition comprising an oligonucleotide that inhibits the expression of MST1R, wherein the oligonucleotide comprises
(a) an siRNA comprising a sense strand and an antisense strand, each strand is independently 12-30 nucleosides in length, and at least one of the sense strand and the antisense strand comprises a nucleoside sequence comprising 12-30 contiguous nucleosides of SEQ ID NO: 9818; or
(b) antisense oligonucleotide (ASO) comprising 12-30 nucleosides in length and a nucleoside sequence complementary to about 12-30 contiguous nucleosides of SEQ ID NO: 9818.

32. The composition of claim 28, wherein any one of the following is true with regard to the sense strand:
all purines comprise 2′-fluoro modified purines, and all pyrimidines comprise a mixture of 2′-fluoro and 2′-O-methyl modified pyrimidines;
all purines comprise 2′-O-methyl modified purines, and all pyrimidines comprise a mixture of 2′-fluoro and 2′-O-methyl modified pyrimidines;
all purines comprise 2′-fluoro modified purines, and all pyrimidines comprise 2′-O-methyl modified pyrimidines;
all pyrimidines comprise 2′-fluoro modified pyrimidines, and all purines comprise a mixture of 2′-fluoro and 2′-O-methyl modified purines;
all pyrimidines comprise 2′-O-methyl modified pyrimidines, and all purines comprise a mixture of 2′-fluoro and 2′-O-methyl modified purines; or
all pyrimidines comprise 2′-fluoro modified pyrimidines, and all purines comprise 2′-Q-methyl modified purines.

33. The composition of claim 28, wherein any one of the following is true with regard to the antisense strand:
all purines comprise 2′-fluoro modified purines, and all pyrimidines comprise a mixture of 2′-fluoro and 2′-O-methyl modified pyrimidines;
all purines comprise 2′-O-methyl modified purines, and all pyrimidines comprise a mixture of 2′-fluoro and 2′-O-methyl modified pyrimidines;
all purines comprise 2′-O-methyl modified purines, and all pyrimidines comprise 2′-fluoro modified pyrimidines;
all pyrimidines comprise 2′-fluoro modified pyrimidines, and all purines comprise a mixture of 2′-fluoro and 2′-O-methyl modified purines;
all pyrimidines comprise 2′-O-methyl modified pyrimidines, and all purines comprise a mixture of 2′-fluoro and 2′-O-methyl modified purines; or
all pyrimidines comprise 2′-O-methyl modified pyrimidines, and all purines comprise 2′-fluoro modified purines.

34-36. (canceled)

37. The composition of claim 1, further comprising a pharmaceutically acceptable carrier.

38. A method of treating a subject having a lung disorder, comprising administering an effective amount of a composition comprising an oligonucleotide that modulates the expression of MST1R, wherein the oligonucleotide comprises
(a) an siRNA comprising a sense strand and an antisense strand, each strand is independently about 12-30 nucleosides in length, and at least one of the sense strand and the antisense strand comprises a nucleoside sequence comprising about 12-30 contiguous nucleosides of SEQ ID NO: 9818; or
(b) antisense oligonucleotide (ASO) comprising 12-30 nucleosides in length and a nucleoside sequence complementary to about 12-30 contiguous nucleosides of SEQ ID NO: 9818 to the subject.

39. The method of claim 38, wherein the lung disorder comprises COPD, acute exacerbation of COPD, emphysema, chronic bronchitis, asthma, status asthmaticus, asthma-COPD overlap syndrome (ACOS), bronchiectasis, cough, dyspnea, mucas hypersecretion, lung cancer, interstitial lung disease, or pulmonary fibrosis.

40. The composition of claim 1, wherein the leukocyte measurement comprises a neutrophil measurement, an eosinophil measurement, a basophil measurement, a monocyte measurement, a lymphocyte measurement, a macrophage measurement, a neutrophil lymphocyte ratio measurement, or a combination thereof.

41. The composition of claim 23, wherein the sugar comprises N-acetylgalactosamine (GalNAc), N-acetylglucosamine (GlcNAc), or mannose.

The application's sequence listing, which the Patent Office published only in electronic form, follows.

SEQUENCE LISTING (9839 sequences)

SEQ ID NO: 1 - RNA, 19 nt, Artificial Sequence
  Description of Artificial Sequence: Synthetic oligonucleotide
aguguacagcggcggcugg

SEQ ID NO: 2 - RNA, 19 nt, Artificial Sequence
  Description of Artificial Sequence: Synthetic oligonucleotide
guguacagcggcggcuggg

SEQ ID NO: 3 - RNA, 19 nt, Artificial Sequence
  Description of Artificial Sequence: Synthetic oligonucleotide
uguacagcggcggcugggg

SEQ ID NO: 4 - RNA, 19 nt, Artificial Sequence
  Description of Artificial Sequence: Synthetic oligonucleotide
guacagcggcggcuggggc

SEQ ID NO: 5 - RNA, 19 nt, Artificial Sequence
  Description of Artificial Sequence: Synthetic oligonucleotide
uacagcggcggcuggggcg

SEQ ID NO: 6 - RNA, 19 nt, Artificial Sequence
  Description of Artificial Sequence: Synthetic oligonucleotide
acagcggcggcuggggcgg

SEQ ID NO: 7 - RNA, 19 nt, Artificial Sequence
  Description of Artificial Sequence: Synthetic oligonucleotide
cagcggcggcuggggcggc

SEQ ID NO: 8 - RNA, 19 nt, Artificial Sequence
  Description of Artificial Sequence: Synthetic oligonucleotide
agcggcggcuggggcggca

SEQ ID NO: 9 - RNA, 19 nt, Artificial Sequence
  Description of Artificial Sequence: Synthetic oligonucleotide
gcggcggcuggggcggcag

SEQ ID NO: 10 - RNA, 19 nt, Artificial Sequence
  Description of Artificial Sequence: Synthetic oligonucleotide
cggcggcuggggcggcagg

SEQ ID NO: 11 - RNA, 19 nt, Artificial Sequence
  Description of Artificial Sequence: Synthetic oligonucleotide
ggcggcuggggcggcaggu

SEQ ID NO: 12 - RNA, 19 nt, Artificial Sequence
  Description of Artificial Sequence: Synthetic oligonucleotide
gcggcuggggcggcaggug

SEQ ID NO: 13 - RNA, 19 nt, Artificial Sequence
  Description of Artificial Sequence: Synthetic oligonucleotide
cggcuggggcggcagguga

SEQ ID NO: 14 - RNA, 19 nt, Artificial Sequence
  Description of Artificial Sequence: Synthetic oligonucleotide
ggcuggggcggcaggugag

SEQ ID NO: 15 - RNA, 19 nt, Artificial Sequence
  Description of Artificial Sequence: Synthetic oligonucleotide
gcuggggcggcaggugagg

SEQ ID NO: 16 - RNA, 19 nt, Artificial Sequence
  Description of Artificial Sequence: Synthetic oligonucleotide
cuggggcggcaggugaggc

SEQ ID NO: 17 - RNA, 19 nt, Artificial Sequence
  Description of Artificial Sequence: Synthetic oligonucleotide
uggggcggcaggugaggcg

SEQ ID NO: 18 - RNA, 19 nt, Artificial Sequence
  Description of Artificial Sequence: Synthetic oligonucleotide
ggggcggcaggugaggcgg

SEQ ID NO: 19 - RNA, 19 nt, Artificial Sequence
  Description of Artificial Sequence: Synthetic oligonucleotide
gggcggcaggugaggcggc

SEQ ID NO: 20 - RNA, 19 nt, Artificial Sequence
  Description of Artificial Sequence: Synthetic oligonucleotide
ggcggcaggugaggcggcu

SEQ ID NO: 21 - RNA, 19 nt, Artificial Sequence
  Description of Artificial Sequence: Synthetic oligonucleotide
gcggcaggugaggcggcug

SEQ ID NO: 22 - RNA, 19 nt, Artificial Sequence
  Description of Artificial Sequence: Synthetic oligonucleotide
cggcaggugaggcggcugg

SEQ ID NO: 23 - RNA, 19 nt, Artificial Sequence
  Description of Artificial Sequence: Synthetic oligonucleotide
ggcaggugaggcggcuggg

SEQ ID NO: 24 - RNA, 19 nt, Artificial Sequence
  Description of Artificial Sequence: Synthetic oligonucleotide
gcaggugaggcggcugggg

SEQ ID NO: 25 - RNA, 19 nt, Artificial Sequence
  Description of Artificial Sequence: Synthetic oligonucleotide
caggugaggcggcuggggc

SEQ ID NO: 26 - RNA, 19 nt, Artificial Sequence
  Description of Artificial Sequence: Synthetic oligonucleotide
aggugaggcggcuggggcg

SEQ ID NO: 27 - RNA, 19 nt, Artificial Sequence
  Description of Artificial Sequence: Synthetic oligonucleotide
ggugaggcggcuggggcgu

SEQ ID NO: 28 - RNA, 19 nt, Artificial Sequence
  Description of Artificial Sequence: Synthetic oligonucleotide
gugaggcggcuggggcguu

SEQ ID NO: 29 - RNA, 19 nt, Artificial Sequence
  Description of Artificial Sequence: Synthetic oligonucleotide
ugaggcggcuggggcguug

SEQ ID NO: 30 - RNA, 19 nt, Artificial Sequence
  Description of Artificial Sequence: Synthetic oligonucleotide
gaggcggcuggggcguugc

SEQ ID NO: 31 - RNA, 19 nt, Artificial Sequence
  Description of Artificial Sequence: Synthetic oligonucleotide
aggcggcuggggcguugcu

SEQ ID NO: 32 - RNA, 19 nt, Artificial Sequence
  Description of Artificial Sequence: Synthetic oligonucleotide
ggcggcuggggcguugcug

SEQ ID NO: 33 - RNA, 19 nt, Artificial Sequence
  Description of Artificial Sequence: Synthetic oligonucleotide
gcggcuggggcguugcugu

SEQ ID NO: 34 - RNA, 19 nt, Artificial Sequence
  Description of Artificial Sequence: Synthetic oligonucleotide
cggcuggggcguugcuguc

SEQ ID NO: 35 - RNA, 19 nt, Artificial Sequence
  Description of Artificial Sequence: Synthetic oligonucleotide
ggcuggggcguugcugucg

SEQ ID NO: 36 - RNA, 19 nt, Artificial Sequence
  Description of Artificial Sequence: Synthetic oligonucleotide
gcuggggcguugcugucgu

SEQ ID NO: 37 - RNA, 19 nt, Artificial Sequence
  Description of Artificial Sequence: Synthetic oligonucleotide
cuggggcguugcugucgug

SEQ ID NO: 38 - RNA, 19 nt, Artificial Sequence
  Description of Artificial Sequence: Synthetic oligonucleotide
uggggcguugcugucgugc

SEQ ID NO: 39 - RNA, 19 nt, Artificial Sequence
  Description of Artificial Sequence: Synthetic oligonucleotide
ggggcguugcugucgugcg

SEQ ID NO: 40 - RNA, 19 nt, Artificial Sequence
  Description of Artificial Sequence: Synthetic oligonucleotide
gggcguugcugucgugcgu

SEQ ID NO: 41 - RNA, 19 nt, Artificial Sequence
  Description of Artificial Sequence: Synthetic oligonucleotide
ggcguugcugucgugcguc

SEQ ID NO: 42 - RNA, 19 nt, Artificial Sequence
  Description of Artificial Sequence: Synthetic oligonucleotide
gcguugcugucgugcgucc

SEQ ID NO: 43 - RNA, 19 nt, Artificial Sequence
  Description of Artificial Sequence: Synthetic oligonucleotide
cguugcugucgugcguccg

SEQ ID NO: 44 - RNA, 19 nt, Artificial Sequence
  Description of Artificial Sequence: Synthetic oligonucleotide
guugcugucgugcguccgc

SEQ ID NO: 45 - RNA, 19 nt, Artificial Sequence
  Description of Artificial Sequence: Synthetic oligonucleotide
uugcugucgugcguccgca

SEQ ID NO: 46 - RNA, 19 nt, Artificial Sequence
  Description of Artificial Sequence: Synthetic oligonucleotide
ugcugucgugcguccgcag

SEQ ID NO: 47 - RNA, 19 nt, Artificial Sequence
  Description of Artificial Sequence: Synthetic oligonucleotide
gcugucgugcguccgcagg

SEQ ID NO: 48 - RNA, 19 nt, Artificial Sequence
  Description of Artificial Sequence: Synthetic oligonucleotide
cugucgugcguccgcaggc

SEQ ID NO: 49 - RNA, 19 nt, Artificial Sequence
  Description of Artificial Sequence: Synthetic oligonucleotide
ugucgugcguccgcaggcg

SEQ ID NO: 50 - RNA, 19 nt, Artificial Sequence
  Description of Artificial Sequence: Synthetic oligonucleotide
gucgugcguccgcaggcgu

SEQ ID NO: 51 - RNA, 19 nt, Artificial Sequence
  Description of Artificial Sequence: Synthetic oligonucleotide
ucgugcguccgcaggcguc

SEQ ID NO: 52 - RNA, 19 nt, Artificial Sequence
  Description of Artificial Sequence: Synthetic oligonucleotide
cgugcguccgcaggcguca

SEQ ID NO: 53 - RNA, 19 nt, Artificial Sequence
  Description of Artificial Sequence: Synthetic oligonucleotide
gugcguccgcaggcgucag

SEQ ID NO: 54 - RNA, 19 nt, Artificial Sequence
  Description of Artificial Sequence: Synthetic oligonucleotide
ugcguccgcaggcgucagg

SEQ ID NO: 55 - RNA, 19 nt, Artificial Sequence
  Description of Artificial Sequence: Synthetic oligonucleotide
gcguccgcaggcgucaggu

SEQ ID NO: 56 - RNA, 19 nt, Artificial Sequence
  Description of Artificial Sequence: Synthetic oligonucleotide
cguccgcaggcgucaggug

SEQ ID NO: 57 - RNA, 19 nt, Artificial Sequence
  Description of Artificial Sequence: Synthetic oligonucleotide
guccgcaggcgucaggugc

SEQ ID NO: 58 - RNA, 19 nt, Artificial Sequence
  Description of Artificial Sequence: Synthetic oligonucleotide
uccgcaggcgucaggugcu

SEQ ID NO: 59 - RNA, 19 nt, Artificial Sequence
  Description of Artificial Sequence: Synthetic oligonucleotide
ccgcaggcgucaggugcuc

SEQ ID NO: 60 - RNA, 19 nt, Artificial Sequence
  Description of Artificial Sequence: Synthetic oligonucleotide
cgcaggcgucaggugcuca

SEQ ID NO: 61 - RNA, 19 nt, Artificial Sequence
  Description of Artificial Sequence: Synthetic oligonucleotide
gcaggcgucaggugcucag

SEQ ID NO: 62 - RNA, 19 nt, Artificial Sequence
  Description of Artificial Sequence: Synthetic oligonucleotide
caggcgucaggugcucaga

SEQ ID NO: 63 - RNA, 19 nt, Artificial Sequence
  Description of Artificial Sequence: Synthetic oligonucleotide
aggcgucaggugcucagac

SEQ ID NO: 64 - RNA, 19 nt, Artificial Sequence
  Description of Artificial Sequence: Synthetic oligonucleotide
ggcgucaggugcucagacc

SEQ ID NO: 65 - RNA, 19 nt, Artificial Sequence
  Description of Artificial Sequence: Synthetic oligonucleotide
gcgucaggugcucagaccc

SEQ ID NO: 66 - RNA, 19 nt, Artificial Sequence
  Description of Artificial Sequence: Synthetic oligonucleotide
cgucaggugcucagacccg

SEQ ID NO: 67 - RNA, 19 nt, Artificial Sequence
  Description of Artificial Sequence: Synthetic oligonucleotide
gucaggugcucagacccga

SEQ ID NO: 68 - RNA, 19 nt, Artificial Sequence
  Description of Artificial Sequence: Synthetic oligonucleotide
ucaggugcucagacccgag

SEQ ID NO: 69 - RNA, 19 nt, Artificial Sequence
  Description of Artificial Sequence: Synthetic oligonucleotide
caggugcucagacccgagg

SEQ ID NO: 70 - RNA, 19 nt, Artificial Sequence
  Description of Artificial Sequence: Synthetic oligonucleotide
aggugcucagacccgaggg

SEQ ID NO: 71 - RNA, 19 nt, Artificial Sequence
  Description of Artificial Sequence: Synthetic oligonucleotide
ggugcucagacccgagggc

SEQ ID NO: 72 - RNA, 19 nt, Artificial Sequence
  Description of Artificial Sequence: Synthetic oligonucleotide
gugcucagacccgagggcc

SEQ ID NO: 73 - RNA, 19 nt, Artificial Sequence
  Description of Artificial Sequence: Synthetic oligonucleotide
ugcucagacccgagggccg

SEQ ID NO: 74 - RNA, 19 nt, Artificial Sequence
  Description of Artificial Sequence: Synthetic oligonucleotide
gcucagacccgagggccgg

SEQ ID NO: 75 - RNA, 19 nt, Artificial Sequence
  Description of Artificial Sequence: Synthetic oligonucleotide
cucagacccgagggccggg

SEQ ID NO: 76 - RNA, 19 nt, Artificial Sequence
  Description of Artificial Sequence: Synthetic oligonucleotide
ucagacccgagggccggga

SEQ ID NO: 77 - RNA, 19 nt, Artificial Sequence
  Description of Artificial Sequence: Synthetic oligonucleotide
cagacccgagggccgggaa

SEQ ID NO: 78 - RNA, 19 nt, Artificial Sequence
  Description of Artificial Sequence: Synthetic oligonucleotide
agacccgagggccgggaag

SEQ ID NO: 79 - RNA, 19 nt, Artificial Sequence
  Description of Artificial Sequence: Synthetic oligonucleotide
gacccgagggccgggaagg

SEQ ID NO: 80 - RNA, 19 nt, Artificial Sequence
  Description of Artificial Sequence: Synthetic oligonucleotide
acccgagggccgggaaggg

SEQ ID NO: 81 - RNA, 19 nt, Artificial Sequence
  Description of Artificial Sequence: Synthetic oligonucleotide
cccgagggccgggaaggga

SEQ ID NO: 82 - RNA, 19 nt, Artificial Sequence
  Description of Artificial Sequence: Synthetic oligonucleotide
ccgagggccgggaagggau

SEQ ID NO: 83 - RNA, 19 nt, Artificial Sequence
  Description of Artificial Sequence: Synthetic oligonucleotide
cgagggccgggaagggauu

SEQ ID NO: 84 - RNA, 19 nt, Artificial Sequence
  Description of Artificial Sequence: Synthetic oligonucleotide
gagggccgggaagggauuu

SEQ ID NO: 85 - RNA, 19 nt, Artificial Sequence
  Description of Artificial Sequence: Synthetic oligonucleotide
agggccgggaagggauuug

SEQ ID NO: 86 - RNA, 19 nt, Artificial Sequence
  Description of Artificial Sequence: Synthetic oligonucleotide
gggccgggaagggauuugg

SEQ ID NO: 87 - RNA, 19 nt, Artificial Sequence
  Description of Artificial Sequence: Synthetic oligonucleotide
ggccgggaagggauuuggg

SEQ ID NO: 88 - RNA, 19 nt, Artificial Sequence
  Description of Artificial Sequence: Synthetic oligonucleotide
gccgggaagggauuugggu

SEQ ID NO: 89 - RNA, 19 nt, Artificial Sequence
  Description of Artificial Sequence: Synthetic oligonucleotide
ccgggaagggauuuggguu

SEQ ID NO: 90 - RNA, 19 nt, Artificial Sequence
  Description of Artificial Sequence: Synthetic oligonucleotide
cgggaagggauuuggguuu

SEQ ID NO: 91 - RNA, 19 nt, Artificial Sequence
  Description of Artificial Sequence: Synthetic oligonucleotide
gggaagggauuuggguuuc

SEQ ID NO: 92 - RNA, 19 nt, Artificial Sequence
  Description of Artificial Sequence: Synthetic oligonucleotide
ggaagggauuuggguuuca

SEQ ID NO: 93 - RNA, 19 nt, Artificial Sequence
  Description of Artificial Sequence: Synthetic oligonucleotide
gaagggauuuggguuucac

SEQ ID NO: 94 - RNA, 19 nt, Artificial Sequence
  Description of Artificial Sequence: Synthetic oligonucleotide
aagggauuuggguuucaca

SEQ ID NO: 95 - RNA, 19 nt, Artificial Sequence
  Description of Artificial Sequence: Synthetic oligonucleotide
agggauuuggguuucacag

SEQ ID NO: 96 - RNA, 19 nt, Artificial Sequence
  Description of Artificial Sequence: Synthetic oligonucleotide
gggauuuggguuucacagg

SEQ ID NO: 97 - RNA, 19 nt, Artificial Sequence
  Description of Artificial Sequence: Synthetic oligonucleotide
ggauuuggguuucacagga

SEQ ID NO: 98 - RNA, 19 nt, Artificial Sequence
  Description of Artificial Sequence: Synthetic oligonucleotide
gauuuggguuucacaggaa

SEQ ID NO: 99 - RNA, 19 nt, Artificial Sequence
  Description of Artificial Sequence: Synthetic oligonucleotide
auuuggguuucacaggaac

SEQ ID NO: 100 - RNA, 19 nt, Artificial Sequence
  Description of Artificial Sequence: Synthetic oligonucleotide
uuuggguuucacaggaacc

SEQ ID NO: 101 - RNA, 19 nt, Artificial Sequence
  Description of Artificial Sequence: Synthetic oligonucleotide
uuggguuucacaggaaccu

SEQ ID NO: 102 - RNA, 19 nt, Artificial Sequence
  Description of Artificial Sequence: Synthetic oligonucleotide
uggguuucacaggaaccug

SEQ ID NO: 103 - RNA, 19 nt, Artificial Sequence
  Description of Artificial Sequence: Synthetic oligonucleotide
ggguuucacaggaaccugg

SEQ ID NO: 104 - RNA, 19 nt, Artificial Sequence
  Description of Artificial Sequence: Synthetic oligonucleotide
gguuucacaggaaccuggg

SEQ ID NO: 105 - RNA, 19 nt, Artificial Sequence
  Description of Artificial Sequence: Synthetic oligonucleotide
guuucacaggaaccugggg

SEQ ID NO: 106 - RNA, 19 nt, Artificial Sequence
  Description of Artificial Sequence: Synthetic oligonucleotide
uuucacaggaaccuggggc

SEQ ID NO: 107 - RNA, 19 nt, Artificial Sequence
  Description of Artificial Sequence: Synthetic oligonucleotide
uucacaggaaccuggggcg

SEQ ID NO: 108 - RNA, 19 nt, Artificial Sequence
  Description of Artificial Sequence: Synthetic oligonucleotide
ucacaggaaccuggggcgg

SEQ ID NO: 109 - RNA, 19 nt, Artificial Sequence
  Description of Artificial Sequence: Synthetic oligonucleotide
cacaggaaccuggggcggg

SEQ ID NO: 110 - RNA, 19 nt, Artificial Sequence
  Description of Artificial Sequence: Synthetic oligonucleotide
acaggaaccuggggcgggg

SEQ ID NO: 111 - RNA, 19 nt, Artificial Sequence
  Description of Artificial Sequence: Synthetic oligonucleotide
caggaaccuggggcggggg

SEQ ID NO: 112 - RNA, 19 nt, Artificial Sequence
  Description of Artificial Sequence: Synthetic oligonucleotide
aggaaccuggggcgggggu

SEQ ID NO: 113 - RNA, 19 nt, Artificial Sequence
  Description of Artificial Sequence: Synthetic oligonucleotide
ggaaccuggggcggggguc

SEQ ID NO: 114 - RNA, 19 nt, Artificial Sequence
  Description of Artificial Sequence: Synthetic oligonucleotide
gaaccuggggcgggggucc

SEQ ID NO: 115 - RNA, 19 nt, Artificial Sequence
  Description of Artificial Sequence: Synthetic oligonucleotide
aaccuggggcggggguccg

SEQ ID NO: 116 - RNA, 19 nt, Artificial Sequence
  Description of Artificial Sequence: Synthetic oligonucleotide
accuggggcggggguccgc

SEQ ID NO: 117 - RNA, 19 nt, Artificial Sequence
  Description of Artificial Sequence: Synthetic oligonucleotide
ccuggggcggggguccgcu

SEQ ID NO: 118 - RNA, 19 nt, Artificial Sequence
  Description of Artificial Sequence: Synthetic oligonucleotide
cuggggcggggguccgcua

SEQ ID NO: 119 - RNA, 19 nt, Artificial Sequence
  Description of Artificial Sequence: Synthetic oligonucleotide
uggggcggggguccgcuau

SEQ ID NO: 120 - RNA, 19 nt, Artificial Sequence
  Description of Artificial Sequence: Synthetic oligonucleotide
ggggcggggguccgcuauc

SEQ ID NO: 121 - RNA, 19 nt, Artificial Sequence
  Description of Artificial Sequence: Synthetic oligonucleotide
gggcggggguccgcuaucu

SEQ ID NO: 122 - RNA, 19 nt, Artificial Sequence
  Description of Artificial Sequence: Synthetic oligonucleotide
ggcggggguccgcuaucuu

SEQ ID NO: 123 - RNA, 19 nt, Artificial Sequence
  Description of Artificial Sequence: Synthetic oligonucleotide
gcggggguccgcuaucuug

SEQ ID NO: 124 - RNA, 19 nt, Artificial Sequence
  Description of Artificial Sequence: Synthetic oligonucleotide
cggggguccgcuaucuugg

SEQ ID NO: 125 - RNA, 19 nt, Artificial Sequence
  Description of Artificial Sequence: Synthetic oligonucleotide
ggggguccgcuaucuuggg

SEQ ID NO: 126 - RNA, 19 nt, Artificial Sequence
  Description of Artificial Sequence: Synthetic oligonucleotide
gggguccgcuaucuugggg

SEQ ID NO: 127 - RNA, 19 nt, Artificial Sequence
  Description of Artificial Sequence: Synthetic oligonucleotide
ggguccgcuaucuuggggc

SEQ ID NO: 128 - RNA, 19 nt, Artificial Sequence
  Description of Artificial Sequence: Synthetic oligonucleotide
gguccgcuaucuuggggcu

SEQ ID NO: 129 - RNA, 19 nt, Artificial Sequence
  Description of Artificial Sequence: Synthetic oligonucleotide
guccgcuaucuuggggcug

SEQ ID NO: 130 - RNA, 19 nt, Artificial Sequence
  Description of Artificial Sequence: Synthetic oligonucleotide
uccgcuaucuuggggcugu

SEQ ID NO: 131 - RNA, 19 nt, Artificial Sequence
  Description of Artificial Sequence: Synthetic oligonucleotide
ccgcuaucuuggggcuguc

SEQ ID NO: 132 - RNA, 19 nt, Artificial Sequence
  Description of Artificial Sequence: Synthetic oligonucleotide
cgcuaucuuggggcugucg

SEQ ID NO: 133 - RNA, 19 nt, Artificial Sequence
  Description of Artificial Sequence: Synthetic oligonucleotide
gcuaucuuggggcugucgg

SEQ ID NO: 134 - RNA, 19 nt, Artificial Sequence
  Description of Artificial Sequence: Synthetic oligonucleotide
cuaucuuggggcugucggg

SEQ ID NO: 135 - RNA, 19 nt, Artificial Sequence
  Description of Artificial Sequence: Synthetic oligonucleotide
uaucuuggggcugucggga

SEQ ID NO: 136 - RNA, 19 nt, Artificial Sequence
  Description of Artificial Sequence: Synthetic oligonucleotide
aucuuggggcugucgggac

SEQ ID NO: 137 - RNA, 19 nt, Artificial Sequence
  Description of Artificial Sequence: Synthetic oligonucleotide
ucuuggggcugucgggacc

SEQ ID NO: 138 - RNA, 19 nt, Artificial Sequence
  Description of Artificial Sequence: Synthetic oligonucleotide
cuuggggcugucgggaccg

SEQ ID NO: 139 - RNA, 19 nt, Artificial Sequence
  Description of Artificial Sequence: Synthetic oligonucleotide
uuggggcugucgggaccgc

SEQ ID NO: 140 - RNA, 19 nt, Artificial Sequence
  Description of Artificial Sequence: Synthetic oligonucleotide
uggggcugucgggaccgcu

SEQ ID NO: 141 - RNA, 19 nt, Artificial Sequence
  Description of Artificial Sequence: Synthetic oligonucleotide
ggggcugucgggaccgcug

SEQ ID NO: 142 - RNA, 19 nt, Artificial Sequence
  Description of Artificial Sequence: Synthetic oligonucleotide
gggcugucgggaccgcugc

SEQ ID NO: 143 - RNA, 19 nt, Artificial Sequence
  Description of Artificial Sequence: Synthetic oligonucleotide
ggcugucgggaccgcugcu

SEQ ID NO: 144 - RNA, 19 nt, Artificial Sequence
  Description of Artificial Sequence: Synthetic oligonucleotide
gcugucgggaccgcugcuu

SEQ ID NO: 145 - RNA, 19 nt, Artificial Sequence
  Description of Artificial Sequence: Synthetic oligonucleotide
cugucgggaccgcugcuua

SEQ ID NO: 146 - RNA, 19 nt, Artificial Sequence
  Description of Artificial Sequence: Synthetic oligonucleotide
ugucgggaccgcugcuuaa

SEQ ID NO: 147 - RNA, 19 nt, Artificial Sequence
  Description of Artificial Sequence: Synthetic oligonucleotide
gucgggaccgcugcuuaaa

SEQ ID NO: 148 - RNA, 19 nt, Artificial Sequence
  Description of Artificial Sequence: Synthetic oligonucleotide
ucgggaccgcugcuuaaau

SEQ ID NO: 149 - RNA, 19 nt, Artificial Sequence
  Description of Artificial Sequence: Synthetic oligonucleotide
cgggaccgcugcuuaaauu

SEQ ID NO: 150 - RNA, 19 nt, Artificial Sequence
  Description of Artificial Sequence: Synthetic oligonucleotide
gggaccgcugcuuaaauuu

SEQ ID NO: 151 - RNA, 19 nt, Artificial Sequence
  Description of Artificial Sequence: Synthetic oligonucleotide
ggaccgcugcuuaaauuug

SEQ ID NO: 152 - RNA, 19 nt, Artificial Sequence
  Description of Artificial Sequence: Synthetic oligonucleotide
gaccgcugcuuaaauuugg

SEQ ID NO: 153 - RNA, 19 nt, Artificial Sequence
  Description of Artificial Sequence: Synthetic oligonucleotide
accgcugcuuaaauuuggc

SEQ ID NO: 154 - RNA, 19 nt, Artificial Sequence
  Description of Artificial Sequence: Synthetic oligonucleotide
ccgcugcuuaaauuuggcc

SEQ ID NO: 155 - RNA, 19 nt, Artificial Sequence
  Description of Artificial Sequence: Synthetic oligonucleotide
cgcugcuuaaauuuggccc

SEQ ID NO: 156 - RNA, 19 nt, Artificial Sequence
  Description of Artificial Sequence: Synthetic oligonucleotide
gcugcuuaaauuuggccca

SEQ ID NO: 157 - RNA, 19 nt, Artificial Sequence
  Description of Artificial Sequence: Synthetic oligonucleotide
cugcuuaaauuuggcccag

SEQ ID NO: 158 - RNA, 19 nt, Artificial Sequence
  Description of Artificial Sequence: Synthetic oligonucleotide
ugcuuaaauuuggcccagu

SEQ ID NO: 159 - RNA, 19 nt, Artificial Sequence
  Description of Artificial Sequence: Synthetic oligonucleotide
gcuuaaauuuggcccaguc

SEQ ID NO: 160 - RNA, 19 nt, Artificial Sequence
  Description of Artificial Sequence: Synthetic oligonucleotide
cuuaaauuuggcccagucc

SEQ ID NO: 161 - RNA, 19 nt, Artificial Sequence
  Description of Artificial Sequence: Synthetic oligonucleotide
uuaaauuuggcccagucca

SEQ ID NO: 162 - RNA, 19 nt, Artificial Sequence
  Description of Artificial Sequence: Synthetic oligonucleotide
uaaauuuggcccaguccag

SEQ ID NO: 163 - RNA, 19 nt, Artificial Sequence
  Description of Artificial Sequence: Synthetic oligonucleotide
aaauuuggcccaguccaga

SEQ ID NO: 164 - RNA, 19 nt, Artificial Sequence
  Description of Artificial Sequence: Synthetic oligonucleotide
aauuuggcccaguccagac

SEQ ID NO: 165 - RNA, 19 nt, Artificial Sequence
  Description of Artificial Sequence: Synthetic oligonucleotide
auuuggcccaguccagacc

SEQ ID NO: 166 - RNA, 19 nt, Artificial Sequence
  Description of Artificial Sequence: Synthetic oligonucleotide
uuuggcccaguccagaccu

SEQ ID NO: 167 - RNA, 19 nt, Artificial Sequence
  Description of Artificial Sequence: Synthetic oligonucleotide
uuggcccaguccagaccuc

SEQ ID NO: 168 - RNA, 19 nt, Artificial Sequence
  Description of Artificial Sequence: Synthetic oligonucleotide
uggcccaguccagaccucg

SEQ ID NO: 169 - RNA, 19 nt, Artificial Sequence
  Description of Artificial Sequence: Synthetic oligonucleotide
ggcccaguccagaccucga

SEQ ID NO: 170 - RNA, 19 nt, Artificial Sequence
  Description of Artificial Sequence: Synthetic oligonucleotide
gcccaguccagaccucgag

SEQ ID NO: 171 - RNA, 19 nt, Artificial Sequence
  Description of Artificial Sequence: Synthetic oligonucleotide
cccaguccagaccucgagu

SEQ ID NO: 172 - RNA, 19 nt, Artificial Sequence
  Description of Artificial Sequence: Synthetic oligonucleotide
ccaguccagaccucgaguc

SEQ ID NO: 173 - RNA, 19 nt, Artificial Sequence
  Description of Artificial Sequence: Synthetic oligonucleotide
caguccagaccucgagucg

SEQ ID NO: 174 - RNA, 19 nt, Artificial Sequence
  Description of Artificial Sequence: Synthetic oligonucleotide
aguccagaccucgagucgg

SEQ ID NO: 175 - RNA, 19 nt, Artificial Sequence
  Description of Artificial Sequence: Synthetic oligonucleotide
guccagaccucgagucggg

SEQ ID NO: 176 - RNA, 19 nt, Artificial Sequence
  Description of Artificial Sequence: Synthetic oligonucleotide
uccagaccucgagucgggc

SEQ ID NO: 177 - RNA, 19 nt, Artificial Sequence
  Description of Artificial Sequence: Synthetic oligonucleotide
ccagaccucgagucgggcc

SEQ ID NO: 178 - RNA, 19 nt, Artificial Sequence
  Description of Artificial Sequence: Synthetic oligonucleotide
cagaccucgagucgggccc

SEQ ID NO: 179 - RNA, 19 nt, Artificial Sequence
  Description of Artificial Sequence: Synthetic oligonucleotide
agaccucgagucgggcccc

SEQ ID NO: 180 - RNA, 19 nt, Artificial Sequence
  Description of Artificial Sequence: Synthetic oligonucleotide
gaccucgagucgggccccc

SEQ ID NO: 181 - RNA, 19 nt, Artificial Sequence
  Description of Artificial Sequence: Synthetic oligonucleotide
accucgagucgggccccca

SEQ ID NO: 182 - RNA, 19 nt, Artificial Sequence
  Description of Artificial Sequence: Synthetic oligonucleotide
ccucgagucgggcccccag

SEQ ID NO: 183 - RNA, 19 nt, Artificial Sequence
  Description of Artificial Sequence: Synthetic oligonucleotide
cucgagucgggcccccagc

SEQ ID NO: 184 - RNA, 19 nt, Artificial Sequence
  Description of Artificial Sequence: Synthetic oligonucleotide
ucgagucgggcccccagcc

SEQ ID NO: 185 - RNA, 19 nt, Artificial Sequence
  Description of Artificial Sequence: Synthetic oligonucleotide
cgagucgggcccccagcca

SEQ ID NO: 186 - RNA, 19 nt, Artificial Sequence
  Description of Artificial Sequence: Synthetic oligonucleotide
gagucgggcccccagccag

SEQ ID NO: 187 - RNA, 19 nt, Artificial Sequence
  Description of Artificial Sequence: Synthetic oligonucleotide
agucgggcccccagccagg

SEQ ID NO: 188 - RNA, 19 nt, Artificial Sequence
  Description of Artificial Sequence: Synthetic oligonucleotide
gucgggcccccagccaggc

SEQ ID NO: 189 - RNA, 19 nt, Artificial Sequence
  Description of Artificial Sequence: Synthetic oligonucleotide
ucgggcccccagccaggcc

SEQ ID NO: 190 - RNA, 19 nt, Artificial Sequence
  Description of Artificial Sequence: Synthetic oligonucleotide
cgggcccccagccaggccc

SEQ ID NO: 191 - RNA, 19 nt, Artificial Sequence
  Description of Artificial Sequence: Synthetic oligonucleotide
gggcccccagccaggccca

SEQ ID NO: 192 - RNA, 19 nt, Artificial Sequence
  Description of Artificial Sequence: Synthetic oligonucleotide
ggcccccagccaggcccac

SEQ ID NO: 193 - RNA, 19 nt, Artificial Sequence
  Description of Artificial Sequence: Synthetic oligonucleotide
gcccccagccaggcccacg

SEQ ID NO: 194 - RNA, 19 nt, Artificial Sequence
  Description of Artificial Sequence: Synthetic oligonucleotide
cccccagccaggcccacgc

SEQ ID NO: 195 - RNA, 19 nt, Artificial Sequence
  Description of Artificial Sequence: Synthetic oligonucleotide
ccccagccaggcccacgcc

SEQ ID NO: 196 - RNA, 19 nt, Artificial Sequence
  Description of Artificial Sequence: Synthetic oligonucleotide
cccagccaggcccacgccc

SEQ ID NO: 197 - RNA, 19 nt, Artificial Sequence
  Description of Artificial Sequence: Synthetic oligonucleotide
ccagccaggcccacgccca

SEQ ID NO: 198 - RNA, 19 nt, Artificial Sequence
  Description of Artificial Sequence: Synthetic oligonucleotide
cagccaggcccacgcccag

SEQ ID NO: 199 - RNA, 19 nt, Artificial Sequence
  Description of Artificial Sequence: Synthetic oligonucleotide
agccaggcccacgcccagg

SEQ ID NO: 200 - RNA, 19 nt, Artificial Sequence
  Description of Artificial Sequence: Synthetic oligonucleotide
gccaggcccacgcccaggu

SEQ ID NO: 201 - RNA, 19 nt, Artificial Sequence
  Description of Artificial Sequence: Synthetic oligonucleotide
ccaggcccacgcccagguc

SEQ ID NO: 202 - RNA, 19 nt, Artificial Sequence
  Description of Artificial Sequence: Synthetic oligonucleotide
caggcccacgcccaggucc

SEQ ID NO: 203 - RNA, 19 nt, Artificial Sequence
  Description of Artificial Sequence: Synthetic oligonucleotide
aggcccacgcccaggucca

SEQ ID NO: 204 - RNA, 19 nt, Artificial Sequence
  Description of Artificial Sequence: Synthetic oligonucleotide
ggcccacgcccagguccag

SEQ ID NO: 205 - RNA, 19 nt, Artificial Sequence
  Description of Artificial Sequence: Synthetic oligonucleotide
gcccacgcccagguccagg

SEQ ID NO: 206 - RNA, 19 nt, Artificial Sequence
  Description of Artificial Sequence: Synthetic oligonucleotide
cccacgcccagguccaggc

SEQ ID NO: 207 - RNA, 19 nt, Artificial Sequence
  Description of Artificial Sequence: Synthetic oligonucleotide
ccacgcccagguccaggcc

SEQ ID NO: 208 - RNA, 19 nt, Artificial Sequence
  Description of Artificial Sequence: Synthetic oligonucleotide
cacgcccagguccaggccc

SEQ ID NO: 209 - RNA, 19 nt, Artificial Sequence
  Description of Artificial Sequence: Synthetic oligonucleotide
acgcccagguccaggccca

SEQ ID NO: 210 - RNA, 19 nt, Artificial Sequence
  Description of Artificial Sequence: Synthetic oligonucleotide
cgcccagguccaggcccag

SEQ ID NO: 211 - RNA, 19 nt, Artificial Sequence
  Description of Artificial Sequence: Synthetic oligonucleotide
gcccagguccaggcccagg

SEQ ID NO: 212 - RNA, 19 nt, Artificial Sequence
  Description of Artificial Sequence: Synthetic oligonucleotide
cccagguccaggcccaggc

SEQ ID NO: 213 - RNA, 19 nt, Artificial Sequence
  Description of Artificial Sequence: Synthetic oligonucleotide
ccagguccaggcccaggcc

SEQ ID NO: 214 - RNA, 19 nt, Artificial Sequence
  Description of Artificial Sequence: Synthetic oligonucleotide
cagguccaggcccaggccg

SEQ ID NO: 215 - RNA, 19 nt, Artificial Sequence
  Description of Artificial Sequence: Synthetic oligonucleotide
agguccaggcccaggccgg

SEQ ID NO: 216 - RNA, 19 nt, Artificial Sequence
  Description of Artificial Sequence: Synthetic oligonucleotide
gguccaggcccaggccggu

SEQ ID NO: 217 - RNA, 19 nt, Artificial Sequence
  Description of Artificial Sequence: Synthetic oligonucleotide
guccaggcccaggccggua

SEQ ID NO: 218 - RNA, 19 nt, Artificial Sequence
  Description of Artificial Sequence: Synthetic oligonucleotide
uccaggcccaggccgguag

SEQ ID NO: 219 - RNA, 19 nt, Artificial Sequence
  Description of Artificial Sequence: Synthetic oligonucleotide
ccaggcccaggccgguagg

SEQ ID NO: 220 - RNA, 19 nt, Artificial Sequence
  Description of Artificial Sequence: Synthetic oligonucleotide
caggcccaggccgguaggg

SEQ ID NO: 221 - RNA, 19 nt, Artificial Sequence
  Description of Artificial Sequence: Synthetic oligonucleotide
aggcccaggccgguaggga

SEQ ID NO: 222 - RNA, 19 nt, Artificial Sequence
  Description of Artificial Sequence: Synthetic oligonucleotide
ggcccaggccgguagggau

SEQ ID NO: 223 - RNA, 19 nt, Artificial Sequence
  Description of Artificial Sequence: Synthetic oligonucleotide
gcccaggccgguagggauc

SEQ ID NO: 224 - RNA, 19 nt, Artificial Sequence
  Description of Artificial Sequence: Synthetic oligonucleotide
cccaggccgguagggaucc

SEQ ID NO: 225 - RNA, 19 nt, Artificial Sequence
  Description of Artificial Sequence: Synthetic oligonucleotide
ccaggccgguagggauccu

SEQ ID NO: 226 - RNA, 19 nt, Artificial Sequence
  Description of Artificial Sequence: Synthetic oligonucleotide
caggccgguagggauccuc

SEQ ID NO: 227 - RNA, 19 nt, Artificial Sequence
  Description of Artificial Sequence: Synthetic oligonucleotide
aggccgguagggauccucu

SEQ ID NO: 228 - RNA, 19 nt, Artificial Sequence
  Description of Artificial Sequence: Synthetic oligonucleotide
ggccgguagggauccucua

SEQ ID NO: 229 - RNA, 19 nt, Artificial Sequence
  Description of Artificial Sequence: Synthetic oligonucleotide
gccgguagggauccucuag

SEQ ID NO: 230 - RNA, 19 nt, Artificial Sequence
  Description of Artificial Sequence: Synthetic oligonucleotide
ccgguagggauccucuagg

SEQ ID NO: 231 - RNA, 19 nt, Artificial Sequence
  Description of Artificial Sequence: Synthetic oligonucleotide
cgguagggauccucuaggg

SEQ ID NO: 232 - RNA, 19 nt, Artificial Sequence
  Description of Artificial Sequence: Synthetic oligonucleotide
gguagggauccucuagggu

SEQ ID NO: 233 - RNA, 19 nt, Artificial Sequence
  Description of Artificial Sequence: Synthetic oligonucleotide
guagggauccucuaggguc

SEQ ID NO: 234 - RNA, 19 nt, Artificial Sequence
  Description of Artificial Sequence: Synthetic oligonucleotide
uagggauccucuagggucc

SEQ ID NO: 235 - RNA, 19 nt, Artificial Sequence
  Description of Artificial Sequence: Synthetic oligonucleotide
agggauccucuaggguccc

SEQ ID NO: 236 - RNA, 19 nt, Artificial Sequence
  Description of Artificial Sequence: Synthetic oligonucleotide
gggauccucuaggguccca

SEQ ID NO: 237 - RNA, 19 nt, Artificial Sequence
  Description of Artificial Sequence: Synthetic oligonucleotide
ggauccucuagggucccag

SEQ ID NO: 238 - RNA, 19 nt, Artificial Sequence
  Description of Artificial Sequence: Synthetic oligonucleotide
gauccucuagggucccagc

SEQ ID NO: 239 - RNA, 19 nt, Artificial Sequence
  Description of Artificial Sequence: Synthetic oligonucleotide
auccucuagggucccagcu

SEQ ID NO: 240 - RNA, 19 nt, Artificial Sequence
  Description of Artificial Sequence: Synthetic oligonucleotide
uccucuagggucccagcuc

SEQ ID NO: 241 - RNA, 19 nt, Artificial Sequence
  Description of Artificial Sequence: Synthetic oligonucleotide
ccucuagggucccagcucg

SEQ ID NO: 242 - RNA, 19 nt, Artificial Sequence
  Description of Artificial Sequence: Synthetic oligonucleotide
cucuagggucccagcucgc

SEQ ID NO: 243 - RNA, 19 nt, Artificial Sequence
  Description of Artificial Sequence: Synthetic oligonucleotide
ucuagggucccagcucgcc

SEQ ID NO: 244 - RNA, 19 nt, Artificial Sequence
  Description of Artificial Sequence: Synthetic oligonucleotide
cuagggucccagcucgccu

SEQ ID NO: 245 - RNA, 19 nt, Artificial Sequence
  Description of Artificial Sequence: Synthetic oligonucleotide
uagggucccagcucgccuc

SEQ ID NO: 246 - RNA, 19 nt, Artificial Sequence
  Description of Artificial Sequence: Synthetic oligonucleotide
agggucccagcucgccucg

SEQ ID NO: 247 - RNA, 19 nt, Artificial Sequence
  Description of Artificial Sequence: Synthetic oligonucleotide
gggucccagcucgccucga

SEQ ID NO: 248 - RNA, 19 nt, Artificial Sequence
  Description of Artificial Sequence: Synthetic oligonucleotide
ggucccagcucgccucgau

SEQ ID NO: 249 - RNA, 19 nt, Artificial Sequence
  Description of Artificial Sequence: Synthetic oligonucleotide
gucccagcucgccucgaug

SEQ ID NO: 250 - RNA, 19 nt, Artificial Sequence
  Description of Artificial Sequence: Synthetic oligonucleotide
ucccagcucgccucgaugg

SEQ ID NO: 251 - RNA, 19 nt, Artificial Sequence
  Description of Artificial Sequence: Synthetic oligonucleotide
cccagcucgccucgaugga

SEQ ID NO: 252 - RNA, 19 nt, Artificial Sequence
  Description of Artificial Sequence: Synthetic oligonucleotide
ccagcucgccucgauggag

SEQ ID NO: 253 - RNA, 19 nt, Artificial Sequence
  Description of Artificial Sequence: Synthetic oligonucleotide
cagcucgccucgauggagc

SEQ ID NO: 254 - RNA, 19 nt, Artificial Sequence
  Description of Artificial Sequence: Synthetic oligonucleotide
agcucgccucgauggagcu

SEQ ID NO: 255 - RNA, 19 nt, Artificial Sequence
  Description of Artificial Sequence: Synthetic oligonucleotide
gcucgccucgauggagcuc

SEQ ID NO: 256 - RNA, 19 nt, Artificial Sequence
  Description of Artificial Sequence: Synthetic oligonucleotide
cucgccucgauggagcucc

SEQ ID NO: 257 - RNA, 19 nt, Artificial Sequence
  Description of Artificial Sequence: Synthetic oligonucleotide
ucgccucgauggagcuccu

SEQ ID NO: 258 - RNA, 19 nt, Artificial Sequence
  Description of Artificial Sequence: Synthetic oligonucleotide
cgccucgauggagcuccuc

SEQ ID NO: 259 - RNA, 19 nt, Artificial Sequence
  Description of Artificial Sequence: Synthetic oligonucleotide
gccucgauggagcuccucc

SEQ ID NO: 260 - RNA, 19 nt, Artificial Sequence
  Description of Artificial Sequence: Synthetic oligonucleotide
ccucgauggagcuccuccc

SEQ ID NO: 261 - RNA, 19 nt, Artificial Sequence
  Description of Artificial Sequence: Synthetic oligonucleotide
cucgauggagcuccucccg

SEQ ID NO: 262 - RNA, 19 nt, Artificial Sequence
  Description of Artificial Sequence: Synthetic oligonucleotide
ucgauggagcuccucccgc

SEQ ID NO: 263 - RNA, 19 nt, Artificial Sequence
  Description of Artificial Sequence: Synthetic oligonucleotide
cgauggagcuccucccgcc

SEQ ID NO: 264 - RNA, 19 nt, Artificial Sequence
  Description of Artificial Sequence: Synthetic oligonucleotide
gauggagcuccucccgccg

SEQ ID NO: 265 - RNA, 19 nt, Artificial Sequence
  Description of Artificial Sequence: Synthetic oligonucleotide
auggagcuccucccgccgc

SEQ ID NO: 266 - RNA, 19 nt, Artificial Sequence
  Description of Artificial Sequence: Synthetic oligonucleotide
uggagcuccucccgccgcu

SEQ ID NO: 267 - RNA, 19 nt, Artificial Sequence
  Description of Artificial Sequence: Synthetic oligonucleotide
ggagcuccucccgccgcug

SEQ ID NO: 268 - RNA, 19 nt, Artificial Sequence
  Description of Artificial Sequence: Synthetic oligonucleotide
gagcuccucccgccgcugc

SEQ ID NO: 269 - RNA, 19 nt, Artificial Sequence
  Description of Artificial Sequence: Synthetic oligonucleotide
agcuccucccgccgcugcc

SEQ ID NO: 270 - RNA, 19 nt, Artificial Sequence
  Description of Artificial Sequence: Synthetic oligonucleotide
gcuccucccgccgcugccu

SEQ ID NO: 271 - RNA, 19 nt, Artificial Sequence
  Description of Artificial Sequence: Synthetic oligonucleotide
cuccucccgccgcugccuc

SEQ ID NO: 272 - RNA, 19 nt, Artificial Sequence
  Description of Artificial Sequence: Synthetic oligonucleotide
uccucccgccgcugccuca

SEQ ID NO: 273 - RNA, 19 nt, Artificial Sequence
  Description of Artificial Sequence: Synthetic oligonucleotide
ccucccgccgcugccucag

SEQ ID NO: 274 - RNA, 19 nt, Artificial Sequence
  Description of Artificial Sequence: Synthetic oligonucleotide
cucccgccgcugccucagu

SEQ ID NO: 275 - RNA, 19 nt, Artificial Sequence
  Description of Artificial Sequence: Synthetic oligonucleotide
ucccgccgcugccucaguc

SEQ ID NO: 276 - RNA, 19 nt, Artificial Sequence
  Description of Artificial Sequence: Synthetic oligonucleotide
cccgccgcugccucagucc

SEQ ID NO: 277 - RNA, 19 nt, Artificial Sequence
  Description of Artificial Sequence: Synthetic oligonucleotide
ccgccgcugccucaguccu

SEQ ID NO: 278 - RNA, 19 nt, Artificial Sequence
  Description of Artificial Sequence: Synthetic oligonucleotide
cgccgcugccucaguccuu

SEQ ID NO: 279 - RNA, 19 nt, Artificial Sequence
  Description of Artificial Sequence: Synthetic oligonucleotide
gccgcugccucaguccuuc

SEQ ID NO: 280 - RNA, 19 nt, Artificial Sequence
  Description of Artificial Sequence: Synthetic oligonucleotide
ccgcugccucaguccuucc

SEQ ID NO: 281 - RNA, 19 nt, Artificial Sequence
  Description of Artificial Sequence: Synthetic oligonucleotide
cgcugccucaguccuuccu

SEQ ID NO: 282 - RNA, 19 nt, Artificial Sequence
  Description of Artificial Sequence: Synthetic oligonucleotide
gcugccucaguccuuccug

SEQ ID NO: 283 - RNA, 19 nt, Artificial Sequence
  Description of Artificial Sequence: Synthetic oligonucleotide
cugccucaguccuuccugu

SEQ ID NO: 284 - RNA, 19 nt, Artificial Sequence
  Description of Artificial Sequence: Synthetic oligonucleotide
ugccucaguccuuccuguu

SEQ ID NO: 285 - RNA, 19 nt, Artificial Sequence
  Description of Artificial Sequence: Synthetic oligonucleotide
gccucaguccuuccuguug

SEQ ID NO: 286 - RNA, 19 nt, Artificial Sequence
  Description of Artificial Sequence: Synthetic oligonucleotide
ccucaguccuuccuguugc

SEQ ID NO: 287 - RNA, 19 nt, Artificial Sequence
  Description of Artificial Sequence: Synthetic oligonucleotide
cucaguccuuccuguugcu

SEQ ID NO: 288 - RNA, 19 nt, Artificial Sequence
  Description of Artificial Sequence: Synthetic oligonucleotide
ucaguccuuccuguugcug

SEQ ID NO: 289 - RNA, 19 nt, Artificial Sequence
  Description of Artificial Sequence: Synthetic oligonucleotide
caguccuuccuguugcugc

SEQ ID NO: 290 - RNA, 19 nt, Artificial Sequence
  Description of Artificial Sequence: Synthetic oligonucleotide
aguccuuccuguugcugcu

SEQ ID NO: 291 - RNA, 19 nt, Artificial Sequence
  Description of Artificial Sequence: Synthetic oligonucleotide
guccuuccuguugcugcug

SEQ ID NO: 292 - RNA, 19 nt, Artificial Sequence
  Description of Artificial Sequence: Synthetic oligonucleotide
uccuuccuguugcugcugc

SEQ ID NO: 293 - RNA, 19 nt, Artificial Sequence
  Description of Artificial Sequence: Synthetic oligonucleotide
ccuuccuguugcugcugcu

SEQ ID NO: 294 - RNA, 19 nt, Artificial Sequence
  Description of Artificial Sequence: Synthetic oligonucleotide
cuuccuguugcugcugcug

SEQ ID NO: 295 - RNA, 19 nt, Artificial Sequence
  Description of Artificial Sequence: Synthetic oligonucleotide
uuccuguugcugcugcugu

SEQ ID NO: 296 - RNA, 19 nt, Artificial Sequence
  Description of Artificial Sequence: Synthetic oligonucleotide
uccuguugcugcugcuguu

SEQ ID NO: 297 - RNA, 19 nt, Artificial Sequence
  Description of Artificial Sequence: Synthetic oligonucleotide
ccuguugcugcugcuguug

SEQ ID NO: 298 - RNA, 19 nt, Artificial Sequence
  Description of Artificial Sequence: Synthetic oligonucleotide
cuguugcugcugcuguugc

SEQ ID NO: 299 - RNA, 19 nt, Artificial Sequence
  Description of Artificial Sequence: Synthetic oligonucleotide
uguugcugcugcuguugcc

SEQ ID NO: 300 - RNA, 19 nt, Artificial Sequence
  Description of Artificial Sequence: Synthetic oligonucleotide
guugcugcugcuguugccu

SEQ ID NO: 301 - RNA, 19 nt, Artificial Sequence
  Description of Artificial Sequence: Synthetic oligonucleotide
uugcugcugcuguugccug

SEQ ID NO: 302 - RNA, 19 nt, Artificial Sequence
  Description of Artificial Sequence: Synthetic oligonucleotide
ugcugcugcuguugccugc

SEQ ID NO: 303 - RNA, 19 nt, Artificial Sequence
  Description of Artificial Sequence: Synthetic oligonucleotide
gcugcugcuguugccugcc

SEQ ID NO: 304 - RNA, 19 nt, Artificial Sequence
  Description of Artificial Sequence: Synthetic oligonucleotide
cugcugcuguugccugcca

SEQ ID NO: 305 - RNA, 19 nt, Artificial Sequence
  Description of Artificial Sequence: Synthetic oligonucleotide
ugcugcuguugccugccaa

SEQ ID NO: 306 - RNA, 19 nt, Artificial Sequence
  Description of Artificial Sequence: Synthetic oligonucleotide
gcugcuguugccugccaag

SEQ ID NO: 307 - RNA, 19 nt, Artificial Sequence
  Description of Artificial Sequence: Synthetic oligonucleotide
cugcuguugccugccaagc

SEQ ID NO: 308 - RNA, 19 nt, Artificial Sequence
  Description of Artificial Sequence: Synthetic oligonucleotide
ugcuguugccugccaagcc

SEQ ID NO: 309 - RNA, 19 nt, Artificial Sequence
  Description of Artificial Sequence: Synthetic oligonucleotide
gcuguugccugccaagccc

SEQ ID NO: 310 - RNA, 19 nt, Artificial Sequence
  Description of Artificial Sequence: Synthetic oligonucleotide
cuguugccugccaagcccg

SEQ ID NO: 311 - RNA, 19 nt, Artificial Sequence
  Description of Artificial Sequence: Synthetic oligonucleotide
uguugccugccaagcccgc

SEQ ID NO: 312 - RNA, 19 nt, Artificial Sequence
  Description of Artificial Sequence: Synthetic oligonucleotide
guugccugccaagcccgcg

SEQ ID NO: 313 - RNA, 19 nt, Artificial Sequence
  Description of Artificial Sequence: Synthetic oligonucleotide
uugccugccaagcccgcgg

SEQ ID NO: 314 - RNA, 19 nt, Artificial Sequence
  Description of Artificial Sequence: Synthetic oligonucleotide
ugccugccaagcccgcggc

SEQ ID NO: 315 - RNA, 19 nt, Artificial Sequence
  Description of Artificial Sequence: Synthetic oligonucleotide
gccugccaagcccgcggcg

SEQ ID NO: 316 - RNA, 19 nt, Artificial Sequence
  Description of Artificial Sequence: Synthetic oligonucleotide
ccugccaagcccgcggcgg

SEQ ID NO: 317 - RNA, 19 nt, Artificial Sequence
  Description of Artificial Sequence: Synthetic oligonucleotide
cugccaagcccgcggcggg

SEQ ID NO: 318 - RNA, 19 nt, Artificial Sequence
  Description of Artificial Sequence: Synthetic oligonucleotide
ugccaagcccgcggcgggc

SEQ ID NO: 319 - RNA, 19 nt, Artificial Sequence
  Description of Artificial Sequence: Synthetic oligonucleotide
gccaagcccgcggcgggcg

SEQ ID NO: 320 - RNA, 19 nt, Artificial Sequence
  Description of Artificial Sequence: Synthetic oligonucleotide
ccaagcccgcggcgggcga

SEQ ID NO: 321 - RNA, 19 nt, Artificial Sequence
  Description of Artificial Sequence: Synthetic oligonucleotide
caagcccgcggcgggcgag

SEQ ID NO: 322 - RNA, 19 nt, Artificial Sequence
  Description of Artificial Sequence: Synthetic oligonucleotide
aagcccgcggcgggcgagg

SEQ ID NO: 323 - RNA, 19 nt, Artificial Sequence
  Description of Artificial Sequence: Synthetic oligonucleotide
agcccgcggcgggcgagga

SEQ ID NO: 324 - RNA, 19 nt, Artificial Sequence
  Description of Artificial Sequence: Synthetic oligonucleotide
gcccgcggcgggcgaggac

SEQ ID NO: 325 - RNA, 19 nt, Artificial Sequence
  Description of Artificial Sequence: Synthetic oligonucleotide
cccgcggcgggcgaggacu

SEQ ID NO: 326 - RNA, 19 nt, Artificial Sequence
  Description of Artificial Sequence: Synthetic oligonucleotide
ccgcggcgggcgaggacug

SEQ ID NO: 327 - RNA, 19 nt, Artificial Sequence
  Description of Artificial Sequence: Synthetic oligonucleotide
cgcggcgggcgaggacugg

SEQ ID NO: 328 - RNA, 19 nt, Artificial Sequence
  Description of Artificial Sequence: Synthetic oligonucleotide
gcggcgggcgaggacuggc

SEQ ID NO: 329 - RNA, 19 nt, Artificial Sequence
  Description of Artificial Sequence: Synthetic oligonucleotide
cggcgggcgaggacuggca

SEQ ID NO: 330 - RNA, 19 nt, Artificial Sequence
  Description of Artificial Sequence: Synthetic oligonucleotide
ggcgggcgaggacuggcag

SEQ ID NO: 331 - RNA, 19 nt, Artificial Sequence
  Description of Artificial Sequence: Synthetic oligonucleotide
gcgggcgaggacuggcagu

SEQ ID NO: 332 - RNA, 19 nt, Artificial Sequence
  Description of Artificial Sequence: Synthetic oligonucleotide
cgggcgaggacuggcagug

SEQ ID NO: 333 - RNA, 19 nt, Artificial Sequence
  Description of Artificial Sequence: Synthetic oligonucleotide
gggcgaggacuggcagugc

SEQ ID NO: 334 - RNA, 19 nt, Artificial Sequence
  Description of Artificial Sequence: Synthetic oligonucleotide
ggcgaggacuggcagugcc

SEQ ID NO: 335 - RNA, 19 nt, Artificial Sequence
  Description of Artificial Sequence: Synthetic oligonucleotide
gcgaggacuggcagugccc

SEQ ID NO: 336 - RNA, 19 nt, Artificial Sequence
  Description of Artificial Sequence: Synthetic oligonucleotide
cgaggacuggcagugcccg

SEQ ID NO: 337 - RNA, 19 nt, Artificial Sequence
  Description of Artificial Sequence: Synthetic oligonucleotide
gaggacuggcagugcccgc

SEQ ID NO: 338 - RNA, 19 nt, Artificial Sequence
  Description of Artificial Sequence: Synthetic oligonucleotide
aggacuggcagugcccgcg

SEQ ID NO: 339 - RNA, 19 nt, Artificial Sequence
  Description of Artificial Sequence: Synthetic oligonucleotide
ggacuggcagugcccgcgc

SEQ ID NO: 340 - RNA, 19 nt, Artificial Sequence
  Description of Artificial Sequence: Synthetic oligonucleotide
gacuggcagugcccgcgca

SEQ ID NO: 341 - RNA, 19 nt, Artificial Sequence
  Description of Artificial Sequence: Synthetic oligonucleotide
acuggcagugcccgcgcac

SEQ ID NO: 342 - RNA, 19 nt, Artificial Sequence
  Description of Artificial Sequence: Synthetic oligonucleotide
cuggcagugcccgcgcacc

SEQ ID NO: 343 - RNA, 19 nt, Artificial Sequence
  Description of Artificial Sequence: Synthetic oligonucleotide
uggcagugcccgcgcaccc

SEQ ID NO: 344 - RNA, 19 nt, Artificial Sequence
  Description of Artificial Sequence: Synthetic oligonucleotide
ggcagugcccgcgcacccc

SEQ ID NO: 345 - RNA, 19 nt, Artificial Sequence
  Description of Artificial Sequence: Synthetic oligonucleotide
gcagugcccgcgcaccccc

SEQ ID NO: 346 - RNA, 19 nt, Artificial Sequence
  Description of Artificial Sequence: Synthetic oligonucleotide
cagugcccgcgcacccccu

SEQ ID NO: 347 - RNA, 19 nt, Artificial Sequence
  Description of Artificial Sequence: Synthetic oligonucleotide
agugcccgcgcacccccua

SEQ ID NO: 348 - RNA, 19 nt, Artificial Sequence
  Description of Artificial Sequence: Synthetic oligonucleotide
gugcccgcgcacccccuac

SEQ ID NO: 349 - RNA, 19 nt, Artificial Sequence
  Description of Artificial Sequence: Synthetic oligonucleotide
ugcccgcgcacccccuacg

SEQ ID NO: 350 - RNA, 19 nt, Artificial Sequence
  Description of Artificial Sequence: Synthetic oligonucleotide
gcccgcgcacccccuacgc

SEQ ID NO: 351 - RNA, 19 nt, Artificial Sequence
  Description of Artificial Sequence: Synthetic oligonucleotide
cccgcgcacccccuacgcg

SEQ ID NO: 352 - RNA, 19 nt, Artificial Sequence
  Description of Artificial Sequence: Synthetic oligonucleotide
ccgcgcacccccuacgcgg

SEQ ID NO: 353 - RNA, 19 nt, Artificial Sequence
  Description of Artificial Sequence: Synthetic oligonucleotide
cgcgcacccccuacgcggc

SEQ ID NO: 354 - RNA, 19 nt, Artificial Sequence
  Description of Artificial Sequence: Synthetic oligonucleotide
gcgcacccccuacgcggcc

SEQ ID NO: 355 - RNA, 19 nt, Artificial Sequence
  Description of Artificial Sequence: Synthetic oligonucleotide
cgcacccccuacgcggccu

SEQ ID NO: 356 - RNA, 19 nt, Artificial Sequence
  Description of Artificial Sequence: Synthetic oligonucleotide
gcacccccuacgcggccuc

SEQ ID NO: 357 - RNA, 19 nt, Artificial Sequence
  Description of Artificial Sequence: Synthetic oligonucleotide
cacccccuacgcggccucu

SEQ ID NO: 358 - RNA, 19 nt, Artificial Sequence
  Description of Artificial Sequence: Synthetic oligonucleotide
acccccuacgcggccucuc

SEQ ID NO: 359 - RNA, 19 nt, Artificial Sequence
  Description of Artificial Sequence: Synthetic oligonucleotide
cccccuacgcggccucucg

SEQ ID NO: 360 - RNA, 19 nt, Artificial Sequence
  Description of Artificial Sequence: Synthetic oligonucleotide
ccccuacgcggccucucgc

SEQ ID NO: 361 - RNA, 19 nt, Artificial Sequence
  Description of Artificial Sequence: Synthetic oligonucleotide
cccuacgcggccucucgcg

SEQ ID NO: 362 - RNA, 19 nt, Artificial Sequence
  Description of Artificial Sequence: Synthetic oligonucleotide
ccuacgcggccucucgcga

SEQ ID NO: 363 - RNA, 19 nt, Artificial Sequence
  Description of Artificial Sequence: Synthetic oligonucleotide
cuacgcggccucucgcgac

SEQ ID NO: 364 - RNA, 19 nt, Artificial Sequence
  Description of Artificial Sequence: Synthetic oligonucleotide
uacgcggccucucgcgacu

SEQ ID NO: 365 - RNA, 19 nt, Artificial Sequence
  Description of Artificial Sequence: Synthetic oligonucleotide
acgcggccucucgcgacuu

SEQ ID NO: 366 - RNA, 19 nt, Artificial Sequence
  Description of Artificial Sequence: Synthetic oligonucleotide
cgcggccucucgcgacuuu

SEQ ID NO: 367 - RNA, 19 nt, Artificial Sequence
  Description of Artificial Sequence: Synthetic oligonucleotide
gcggccucucgcgacuuug

SEQ ID NO: 368 - RNA, 19 nt, Artificial Sequence
  Description of Artificial Sequence: Synthetic oligonucleotide
cggccucucgcgacuuuga

SEQ ID NO: 369 - RNA, 19 nt, Artificial Sequence
  Description of Artificial Sequence: Synthetic oligonucleotide
ggccucucgcgacuuugac

SEQ ID NO: 370 - RNA, 19 nt, Artificial Sequence
  Description of Artificial Sequence: Synthetic oligonucleotide
gccucucgcgacuuugacg

SEQ ID NO: 371 - RNA, 19 nt, Artificial Sequence
  Description of Artificial Sequence: Synthetic oligonucleotide
ccucucgcgacuuugacgu

SEQ ID NO: 372 - RNA, 19 nt, Artificial Sequence
  Description of Artificial Sequence: Synthetic oligonucleotide
cucucgcgacuuugacgug

SEQ ID NO: 373 - RNA, 19 nt, Artificial Sequence
  Description of Artificial Sequence: Synthetic oligonucleotide
ucucgcgacuuugacguga

SEQ ID NO: 374 - RNA, 19 nt, Artificial Sequence
  Description of Artificial Sequence: Synthetic oligonucleotide
cucgcgacuuugacgugaa

SEQ ID NO: 375 - RNA, 19 nt, Artificial Sequence
  Description of Artificial Sequence: Synthetic oligonucleotide
ucgcgacuuugacgugaag

SEQ ID NO: 376 - RNA, 19 nt, Artificial Sequence
  Description of Artificial Sequence: Synthetic oligonucleotide
cgcgacuuugacgugaagu

SEQ ID NO: 377 - RNA, 19 nt, Artificial Sequence
  Description of Artificial Sequence: Synthetic oligonucleotide
gcgacuuugacgugaagua

SEQ ID NO: 378 - RNA, 19 nt, Artificial Sequence
  Description of Artificial Sequence: Synthetic oligonucleotide
cgacuuugacgugaaguac

SEQ ID NO: 379 - RNA, 19 nt, Artificial Sequence
  Description of Artificial Sequence: Synthetic oligonucleotide
gacuuugacgugaaguacg

SEQ ID NO: 380 - RNA, 19 nt, Artificial Sequence
  Description of Artificial Sequence: Synthetic oligonucleotide
acuuugacgugaaguacgu

SEQ ID NO: 381 - RNA, 19 nt, Artificial Sequence
  Description of Artificial Sequence: Synthetic oligonucleotide
cuuugacgugaaguacgug

SEQ ID NO: 382 - RNA, 19 nt, Artificial Sequence
  Description of Artificial Sequence: Synthetic oligonucleotide
uuugacgugaaguacgugg

SEQ ID NO: 383 - RNA, 19 nt, Artificial Sequence
  Description of Artificial Sequence: Synthetic oligonucleotide
uugacgugaaguacguggu

SEQ ID NO: 384 - RNA, 19 nt, Artificial Sequence
  Description of Artificial Sequence: Synthetic oligonucleotide
ugacgugaaguacguggug

SEQ ID NO: 385 - RNA, 19 nt, Artificial Sequence
  Description of Artificial Sequence: Synthetic oligonucleotide
gacgugaaguacguggugc

SEQ ID NO: 386 - RNA, 19 nt, Artificial Sequence
  Description of Artificial Sequence: Synthetic oligonucleotide
acgugaaguacguggugcc

SEQ ID NO: 387 - RNA, 19 nt, Artificial Sequence
  Description of Artificial Sequence: Synthetic oligonucleotide
cgugaaguacguggugccc

SEQ ID NO: 388 - RNA, 19 nt, Artificial Sequence
  Description of Artificial Sequence: Synthetic oligonucleotide
gugaaguacguggugccca

SEQ ID NO: 389 - RNA, 19 nt, Artificial Sequence
  Description of Artificial Sequence: Synthetic oligonucleotide
ugaaguacguggugcccag

SEQ ID NO: 390 - RNA, 19 nt, Artificial Sequence
  Description of Artificial Sequence: Synthetic oligonucleotide
gaaguacguggugcccagc

SEQ ID NO: 391 - RNA, 19 nt, Artificial Sequence
  Description of Artificial Sequence: Synthetic oligonucleotide
aaguacguggugcccagcu

SEQ ID NO: 392 - RNA, 19 nt, Artificial Sequence
  Description of Artificial Sequence: Synthetic oligonucleotide
aguacguggugcccagcuu

SEQ ID NO: 393 - RNA, 19 nt, Artificial Sequence
  Description of Artificial Sequence: Synthetic oligonucleotide
guacguggugcccagcuuc

SEQ ID NO: 394 - RNA, 19 nt, Artificial Sequence
  Description of Artificial Sequence: Synthetic oligonucleotide
uacguggugcccagcuucu

SEQ ID NO: 395 - RNA, 19 nt, Artificial Sequence
  Description of Artificial Sequence: Synthetic oligonucleotide
acguggugcccagcuucuc

SEQ ID NO: 396 - RNA, 19 nt, Artificial Sequence
  Description of Artificial Sequence: Synthetic oligonucleotide
cguggugcccagcuucucc

SEQ ID NO: 397 - RNA, 19 nt, Artificial Sequence
  Description of Artificial Sequence: Synthetic oligonucleotide
guggugcccagcuucuccg

SEQ ID NO: 398 - RNA, 19 nt, Artificial Sequence
  Description of Artificial Sequence: Synthetic oligonucleotide
uggugcccagcuucuccgc

SEQ ID NO: 399 - RNA, 19 nt, Artificial Sequence
  Description of Artificial Sequence: Synthetic oligonucleotide
ggugcccagcuucuccgcc

SEQ ID NO: 400 - RNA, 19 nt, Artificial Sequence
  Description of Artificial Sequence: Synthetic oligonucleotide
gugcccagcuucuccgccg

SEQ ID NO: 401 - RNA, 19 nt, Artificial Sequence
  Description of Artificial Sequence: Synthetic oligonucleotide
ugcccagcuucuccgccgg

SEQ ID NO: 402 - RNA, 19 nt, Artificial Sequence
  Description of Artificial Sequence: Synthetic oligonucleotide
gcccagcuucuccgccgga

SEQ ID NO: 403 - RNA, 19 nt, Artificial Sequence
  Description of Artificial Sequence: Synthetic oligonucleotide
cccagcuucuccgccggag

SEQ ID NO: 404 - RNA, 19 nt, Artificial Sequence
  Description of Artificial Sequence: Synthetic oligonucleotide
ccagcuucuccgccggagg

SEQ ID NO: 405 - RNA, 19 nt, Artificial Sequence
  Description of Artificial Sequence: Synthetic oligonucleotide
cagcuucuccgccggaggc

SEQ ID NO: 406 - RNA, 19 nt, Artificial Sequence
  Description of Artificial Sequence: Synthetic oligonucleotide
agcuucuccgccggaggcc

SEQ ID NO: 407 - RNA, 19 nt, Artificial Sequence
  Description of Artificial Sequence: Synthetic oligonucleotide
gcuucuccgccggaggccu

SEQ ID NO: 408 - RNA, 19 nt, Artificial Sequence
  Description of Artificial Sequence: Synthetic oligonucleotide
cuucuccgccggaggccug

SEQ ID NO: 409 - RNA, 19 nt, Artificial Sequence
  Description of Artificial Sequence: Synthetic oligonucleotide
uucuccgccggaggccugg

SEQ ID NO: 410 - RNA, 19 nt, Artificial Sequence
  Description of Artificial Sequence: Synthetic oligonucleotide
ucuccgccggaggccuggu

SEQ ID NO: 411 - RNA, 19 nt, Artificial Sequence
  Description of Artificial Sequence: Synthetic oligonucleotide
cuccgccggaggccuggua

SEQ ID NO: 412 - RNA, 19 nt, Artificial Sequence
  Description of Artificial Sequence: Synthetic oligonucleotide
uccgccggaggccugguac

SEQ ID NO: 413 - RNA, 19 nt, Artificial Sequence
  Description of Artificial Sequence: Synthetic oligonucleotide
ccgccggaggccugguaca

SEQ ID NO: 414 - RNA, 19 nt, Artificial Sequence
  Description of Artificial Sequence: Synthetic oligonucleotide
cgccggaggccugguacag

SEQ ID NO: 415 - RNA, 19 nt, Artificial Sequence
  Description of Artificial Sequence: Synthetic oligonucleotide
gccggaggccugguacagg

SEQ ID NO: 416 - RNA, 19 nt, Artificial Sequence
  Description of Artificial Sequence: Synthetic oligonucleotide
ccggaggccugguacaggc

SEQ ID NO: 417 - RNA, 19 nt, Artificial Sequence
  Description of Artificial Sequence: Synthetic oligonucleotide
cggaggccugguacaggcc

SEQ ID NO: 418 - RNA, 19 nt, Artificial Sequence
  Description of Artificial Sequence: Synthetic oligonucleotide
ggaggccugguacaggcca

SEQ ID NO: 419 - RNA, 19 nt, Artificial Sequence
  Description of Artificial Sequence: Synthetic oligonucleotide
gaggccugguacaggccau

SEQ ID NO: 420 - RNA, 19 nt, Artificial Sequence
  Description of Artificial Sequence: Synthetic oligonucleotide
aggccugguacaggccaug

SEQ ID NO: 421 - RNA, 19 nt, Artificial Sequence
  Description of Artificial Sequence: Synthetic oligonucleotide
ggccugguacaggccaugg

SEQ ID NO: 422 - RNA, 19 nt, Artificial Sequence
  Description of Artificial Sequence: Synthetic oligonucleotide
gccugguacaggccauggu

SEQ ID NO: 423 - RNA, 19 nt, Artificial Sequence
  Description of Artificial Sequence: Synthetic oligonucleotide
ccugguacaggccauggug

SEQ ID NO: 424 - RNA, 19 nt, Artificial Sequence
  Description of Artificial Sequence: Synthetic oligonucleotide
cugguacaggccaugguga

SEQ ID NO: 425 - RNA, 19 nt, Artificial Sequence
  Description of Artificial Sequence: Synthetic oligonucleotide
ugguacaggccauggugac

SEQ ID NO: 426 - RNA, 19 nt, Artificial Sequence
  Description of Artificial Sequence: Synthetic oligonucleotide
gguacaggccauggugacc

SEQ ID NO: 427 - RNA, 19 nt, Artificial Sequence
  Description of Artificial Sequence: Synthetic oligonucleotide
guacaggccauggugaccu

SEQ ID NO: 428 - RNA, 19 nt, Artificial Sequence
  Description of Artificial Sequence: Synthetic oligonucleotide
uacaggccauggugaccua

SEQ ID NO: 429 - RNA, 19 nt, Artificial Sequence
  Description of Artificial Sequence: Synthetic oligonucleotide
acaggccauggugaccuac

SEQ ID NO: 430 - RNA, 19 nt, Artificial Sequence
  Description of Artificial Sequence: Synthetic oligonucleotide
caggccauggugaccuacg

SEQ ID NO: 431 - RNA, 19 nt, Artificial Sequence
  Description of Artificial Sequence: Synthetic oligonucleotide
aggccauggugaccuacga

SEQ ID NO: 432 - RNA, 19 nt, Artificial Sequence
  Description of Artificial Sequence: Synthetic oligonucleotide
ggccauggugaccuacgag

SEQ ID NO: 433 - RNA, 19 nt, Artificial Sequence
  Description of Artificial Sequence: Synthetic oligonucleotide
gccauggugaccuacgagg

SEQ ID NO: 434 - RNA, 19 nt, Artificial Sequence
  Description of Artificial Sequence: Synthetic oligonucleotide
ccauggugaccuacgaggg

SEQ ID NO: 435 - RNA, 19 nt, Artificial Sequence
  Description of Artificial Sequence: Synthetic oligonucleotide
cauggugaccuacgagggc

SEQ ID NO: 436 - RNA, 19 nt, Artificial Sequence
  Description of Artificial Sequence: Synthetic oligonucleotide
auggugaccuacgagggcg

SEQ ID NO: 437 - RNA, 19 nt, Artificial Sequence
  Description of Artificial Sequence: Synthetic oligonucleotide
uggugaccuacgagggcga

SEQ ID NO: 438 - RNA, 19 nt, Artificial Sequence
  Description of Artificial Sequence: Synthetic oligonucleotide
ggugaccuacgagggcgac

SEQ ID NO: 439 - RNA, 19 nt, Artificial Sequence
  Description of Artificial Sequence: Synthetic oligonucleotide
gugaccuacgagggcgaca

SEQ ID NO: 440 - RNA, 19 nt, Artificial Sequence
  Description of Artificial Sequence: Synthetic oligonucleotide
ugaccuacgagggcgacag

SEQ ID NO: 441 - RNA, 19 nt, Artificial Sequence
  Description of Artificial Sequence: Synthetic oligonucleotide
gaccuacgagggcgacaga

SEQ ID NO: 442 - RNA, 19 nt, Artificial Sequence
  Description of Artificial Sequence: Synthetic oligonucleotide
accuacgagggcgacagaa

SEQ ID NO: 443 - RNA, 19 nt, Artificial Sequence
  Description of Artificial Sequence: Synthetic oligonucleotide
ccuacgagggcgacagaaa

SEQ ID NO: 444 - RNA, 19 nt, Artificial Sequence
  Description of Artificial Sequence: Synthetic oligonucleotide
cuacgagggcgacagaaau

SEQ ID NO: 445 - RNA, 19 nt, Artificial Sequence
  Description of Artificial Sequence: Synthetic oligonucleotide
uacgagggcgacagaaaug

SEQ ID NO: 446 - RNA, 19 nt, Artificial Sequence
  Description of Artificial Sequence: Synthetic oligonucleotide
acgagggcgacagaaauga

SEQ ID NO: 447 - RNA, 19 nt, Artificial Sequence
  Description of Artificial Sequence: Synthetic oligonucleotide
cgagggcgacagaaaugag

SEQ ID NO: 448 - RNA, 19 nt, Artificial Sequence
  Description of Artificial Sequence: Synthetic oligonucleotide
gagggcgacagaaaugaga

SEQ ID NO: 449 - RNA, 19 nt, Artificial Sequence
  Description of Artificial Sequence: Synthetic oligonucleotide
agggcgacagaaaugagag

SEQ ID NO: 450 - RNA, 19 nt, Artificial Sequence
  Description of Artificial Sequence: Synthetic oligonucleotide
gggcgacagaaaugagagu

SEQ ID NO: 451 - RNA, 19 nt, Artificial Sequence
  Description of Artificial Sequence: Synthetic oligonucleotide
ggcgacagaaaugagagug

SEQ ID NO: 452 - RNA, 19 nt, Artificial Sequence
  Description of Artificial Sequence: Synthetic oligonucleotide
gcgacagaaaugagagugc

SEQ ID NO: 453 - RNA, 19 nt, Artificial Sequence
  Description of Artificial Sequence: Synthetic oligonucleotide
cgacagaaaugagagugcu

SEQ ID NO: 454 - RNA, 19 nt, Artificial Sequence
  Description of Artificial Sequence: Synthetic oligonucleotide
gacagaaaugagagugcug

SEQ ID NO: 455 - RNA, 19 nt, Artificial Sequence
  Description of Artificial Sequence: Synthetic oligonucleotide
acagaaaugagagugcugu

SEQ ID NO: 456 - RNA, 19 nt, Artificial Sequence
  Description of Artificial Sequence: Synthetic oligonucleotide
cagaaaugagagugcugug

SEQ ID NO: 457 - RNA, 19 nt, Artificial Sequence
  Description of Artificial Sequence: Synthetic oligonucleotide
agaaaugagagugcugugu

SEQ ID NO: 458 - RNA, 19 nt, Artificial Sequence
  Description of Artificial Sequence: Synthetic oligonucleotide
gaaaugagagugcuguguu

SEQ ID NO: 459 - RNA, 19 nt, Artificial Sequence
  Description of Artificial Sequence: Synthetic oligonucleotide
aaaugagagugcuguguuu

SEQ ID NO: 460 - RNA, 19 nt, Artificial Sequence
  Description of Artificial Sequence: Synthetic oligonucleotide
aaugagagugcuguguuug

SEQ ID NO: 461 - RNA, 19 nt, Artificial Sequence
  Description of Artificial Sequence: Synthetic oligonucleotide
augagagugcuguguuugu

SEQ ID NO: 462 - RNA, 19 nt, Artificial Sequence
  Description of Artificial Sequence: Synthetic oligonucleotide
ugagagugcuguguuugua

SEQ ID NO: 463 - RNA, 19 nt, Artificial Sequence
  Description of Artificial Sequence: Synthetic oligonucleotide
gagagugcuguguuuguag

SEQ ID NO: 464 - RNA, 19 nt, Artificial Sequence
  Description of Artificial Sequence: Synthetic oligonucleotide
agagugcuguguuuguagc

SEQ ID NO: 465 - RNA, 19 nt, Artificial Sequence
  Description of Artificial Sequence: Synthetic oligonucleotide
gagugcuguguuuguagcc

SEQ ID NO: 466 - RNA, 19 nt, Artificial Sequence
  Description of Artificial Sequence: Synthetic oligonucleotide
agugcuguguuuguagcca

SEQ ID NO: 467 - RNA, 19 nt, Artificial Sequence
  Description of Artificial Sequence: Synthetic oligonucleotide
gugcuguguuuguagccau

SEQ ID NO: 468 - RNA, 19 nt, Artificial Sequence
  Description of Artificial Sequence: Synthetic oligonucleotide
ugcuguguuuguagccaua

SEQ ID NO: 469 - RNA, 19 nt, Artificial Sequence
  Description of Artificial Sequence: Synthetic oligonucleotide
gcuguguuuguagccauac

SEQ ID NO: 470 - RNA, 19 nt, Artificial Sequence
  Description of Artificial Sequence: Synthetic oligonucleotide
cuguguuuguagccauacg

SEQ ID NO: 471 - RNA, 19 nt, Artificial Sequence
  Description of Artificial Sequence: Synthetic oligonucleotide
uguguuuguagccauacgc

SEQ ID NO: 472 - RNA, 19 nt, Artificial Sequence
  Description of Artificial Sequence: Synthetic oligonucleotide
guguuuguagccauacgca

SEQ ID NO: 473 - RNA, 19 nt, Artificial Sequence
  Description of Artificial Sequence: Synthetic oligonucleotide
uguuuguagccauacgcaa

SEQ ID NO: 474 - RNA, 19 nt, Artificial Sequence
  Description of Artificial Sequence: Synthetic oligonucleotide
guuuguagccauacgcaau

SEQ ID NO: 475 - RNA, 19 nt, Artificial Sequence
  Description of Artificial Sequence: Synthetic oligonucleotide
uuuguagccauacgcaauc

SEQ ID NO: 476 - RNA, 19 nt, Artificial Sequence
  Description of Artificial Sequence: Synthetic oligonucleotide
uuguagccauacgcaaucg

SEQ ID NO: 477 - RNA, 19 nt, Artificial Sequence
  Description of Artificial Sequence: Synthetic oligonucleotide
uguagccauacgcaaucgc

SEQ ID NO: 478 - RNA, 19 nt, Artificial Sequence
  Description of Artificial Sequence: Synthetic oligonucleotide
guagccauacgcaaucgcc

SEQ ID NO: 479 - RNA, 19 nt, Artificial Sequence
  Description of Artificial Sequence: Synthetic oligonucleotide
uagccauacgcaaucgccu

SEQ ID NO: 480 - RNA, 19 nt, Artificial Sequence
  Description of Artificial Sequence: Synthetic oligonucleotide
agccauacgcaaucgccug

SEQ ID NO: 481 - RNA, 19 nt, Artificial Sequence
  Description of Artificial Sequence: Synthetic oligonucleotide
gccauacgcaaucgccugc

SEQ ID NO: 482 - RNA, 19 nt, Artificial Sequence
  Description of Artificial Sequence: Synthetic oligonucleotide
ccauacgcaaucgccugca

SEQ ID NO: 483 - RNA, 19 nt, Artificial Sequence
  Description of Artificial Sequence: Synthetic oligonucleotide
cauacgcaaucgccugcau

SEQ ID NO: 484 - RNA, 19 nt, Artificial Sequence
  Description of Artificial Sequence: Synthetic oligonucleotide
auacgcaaucgccugcaug

SEQ ID NO: 485 - RNA, 19 nt, Artificial Sequence
  Description of Artificial Sequence: Synthetic oligonucleotide
uacgcaaucgccugcaugu

SEQ ID NO: 486 - RNA, 19 nt, Artificial Sequence
  Description of Artificial Sequence: Synthetic oligonucleotide
acgcaaucgccugcaugug

SEQ ID NO: 487 - RNA, 19 nt, Artificial Sequence
  Description of Artificial Sequence: Synthetic oligonucleotide
cgcaaucgccugcaugugc

SEQ ID NO: 488 - RNA, 19 nt, Artificial Sequence
  Description of Artificial Sequence: Synthetic oligonucleotide
gcaaucgccugcaugugcu

SEQ ID NO: 489 - RNA, 19 nt, Artificial Sequence
  Description of Artificial Sequence: Synthetic oligonucleotide
caaucgccugcaugugcuu

SEQ ID NO: 490 - RNA, 19 nt, Artificial Sequence
  Description of Artificial Sequence: Synthetic oligonucleotide
aaucgccugcaugugcuug

SEQ ID NO: 491 - RNA, 19 nt, Artificial Sequence
  Description of Artificial Sequence: Synthetic oligonucleotide
aucgccugcaugugcuugg

SEQ ID NO: 492 - RNA, 19 nt, Artificial Sequence
  Description of Artificial Sequence: Synthetic oligonucleotide
ucgccugcaugugcuuggg

SEQ ID NO: 493 - RNA, 19 nt, Artificial Sequence
  Description of Artificial Sequence: Synthetic oligonucleotide
cgccugcaugugcuugggc

SEQ ID NO: 494 - RNA, 19 nt, Artificial Sequence
  Description of Artificial Sequence: Synthetic oligonucleotide
gccugcaugugcuugggcc

SEQ ID NO: 495 - RNA, 19 nt, Artificial Sequence
  Description of Artificial Sequence: Synthetic oligonucleotide
ccugcaugugcuugggccu

SEQ ID NO: 496 - RNA, 19 nt, Artificial Sequence
  Description of Artificial Sequence: Synthetic oligonucleotide
cugcaugugcuugggccug

SEQ ID NO: 497 - RNA, 19 nt, Artificial Sequence
  Description of Artificial Sequence: Synthetic oligonucleotide
ugcaugugcuugggccuga

SEQ ID NO: 498 - RNA, 19 nt, Artificial Sequence
  Description of Artificial Sequence: Synthetic oligonucleotide
gcaugugcuugggccugac

SEQ ID NO: 499 - RNA, 19 nt, Artificial Sequence
  Description of Artificial Sequence: Synthetic oligonucleotide
caugugcuugggccugacc

SEQ ID NO: 500 - RNA, 19 nt, Artificial Sequence
  Description of Artificial Sequence: Synthetic oligonucleotide
augugcuugggccugaccu

SEQ ID NO: 501 - RNA, 19 nt, Artificial Sequence
  Description of Artificial Sequence: Synthetic oligonucleotide
ugugcuugggccugaccug

SEQ ID NO: 502 - RNA, 19 nt, Artificial Sequence
  Description of Artificial Sequence: Synthetic oligonucleotide
gugcuugggccugaccuga

SEQ ID NO: 503 - RNA, 19 nt, Artificial Sequence
  Description of Artificial Sequence: Synthetic oligonucleotide
ugcuugggccugaccugaa

SEQ ID NO: 504 - RNA, 19 nt, Artificial Sequence
  Description of Artificial Sequence: Synthetic oligonucleotide
gcuugggccugaccugaag

SEQ ID NO: 505 - RNA, 19 nt, Artificial Sequence
  Description of Artificial Sequence: Synthetic oligonucleotide
cuugggccugaccugaagu

SEQ ID NO: 506 - RNA, 19 nt, Artificial Sequence
  Description of Artificial Sequence: Synthetic oligonucleotide
uugggccugaccugaaguc

SEQ ID NO: 507 - RNA, 19 nt, Artificial Sequence
  Description of Artificial Sequence: Synthetic oligonucleotide
ugggccugaccugaagucu

SEQ ID NO: 508 - RNA, 19 nt, Artificial Sequence
  Description of Artificial Sequence: Synthetic oligonucleotide
gggccugaccugaagucug

SEQ ID NO: 509 - RNA, 19 nt, Artificial Sequence
  Description of Artificial Sequence: Synthetic oligonucleotide
ggccugaccugaagucugu

SEQ ID NO: 510 - RNA, 19 nt, Artificial Sequence
  Description of Artificial Sequence: Synthetic oligonucleotide
gccugaccugaagucuguc

SEQ ID NO: 511 - RNA, 19 nt, Artificial Sequence
  Description of Artificial Sequence: Synthetic oligonucleotide
ccugaccugaagucugucc

SEQ ID NO: 512 - RNA, 19 nt, Artificial Sequence
  Description of Artificial Sequence: Synthetic oligonucleotide
cugaccugaagucugucca

SEQ ID NO: 513 - RNA, 19 nt, Artificial Sequence
  Description of Artificial Sequence: Synthetic oligonucleotide
ugaccugaagucuguccag

SEQ ID NO: 514 - RNA, 19 nt, Artificial Sequence
  Description of Artificial Sequence: Synthetic oligonucleotide
gaccugaagucuguccaga

SEQ ID NO: 515 - RNA, 19 nt, Artificial Sequence
  Description of Artificial Sequence: Synthetic oligonucleotide
accugaagucuguccagag

SEQ ID NO: 516 - RNA, 19 nt, Artificial Sequence
  Description of Artificial Sequence: Synthetic oligonucleotide
ccugaagucuguccagagc

SEQ ID NO: 517 - RNA, 19 nt, Artificial Sequence
  Description of Artificial Sequence: Synthetic oligonucleotide
cugaagucuguccagagcc

SEQ ID NO: 518 - RNA, 19 nt, Artificial Sequence
  Description of Artificial Sequence: Synthetic oligonucleotide
ugaagucuguccagagccu

SEQ ID NO: 519 - RNA, 19 nt, Artificial Sequence
  Description of Artificial Sequence: Synthetic oligonucleotide
gaagucuguccagagccug

SEQ ID NO: 520 - RNA, 19 nt, Artificial Sequence
  Description of Artificial Sequence: Synthetic oligonucleotide
aagucuguccagagccugg

SEQ ID NO: 521 - RNA, 19 nt, Artificial Sequence
  Description of Artificial Sequence: Synthetic oligonucleotide
agucuguccagagccuggc

SEQ ID NO: 522 - RNA, 19 nt, Artificial Sequence
  Description of Artificial Sequence: Synthetic oligonucleotide
gucuguccagagccuggcc

SEQ ID NO: 523 - RNA, 19 nt, Artificial Sequence
  Description of Artificial Sequence: Synthetic oligonucleotide
ucuguccagagccuggcca

SEQ ID NO: 524 - RNA, 19 nt, Artificial Sequence
  Description of Artificial Sequence: Synthetic oligonucleotide
cuguccagagccuggccac

SEQ ID NO: 525 - RNA, 19 nt, Artificial Sequence
  Description of Artificial Sequence: Synthetic oligonucleotide
uguccagagccuggccacg

SEQ ID NO: 526 - RNA, 19 nt, Artificial Sequence
  Description of Artificial Sequence: Synthetic oligonucleotide
guccagagccuggccacgg

SEQ ID NO: 527 - RNA, 19 nt, Artificial Sequence
  Description of Artificial Sequence: Synthetic oligonucleotide
uccagagccuggccacggg

SEQ ID NO: 528 - RNA, 19 nt, Artificial Sequence
  Description of Artificial Sequence: Synthetic oligonucleotide
ccagagccuggccacgggc

SEQ ID NO: 529 - RNA, 19 nt, Artificial Sequence
  Description of Artificial Sequence: Synthetic oligonucleotide
cagagccuggccacgggcc

SEQ ID NO: 530 - RNA, 19 nt, Artificial Sequence
  Description of Artificial Sequence: Synthetic oligonucleotide
agagccuggccacgggccc

SEQ ID NO: 531 - RNA, 19 nt, Artificial Sequence
  Description of Artificial Sequence: Synthetic oligonucleotide
gagccuggccacgggcccu

SEQ ID NO: 532 - RNA, 19 nt, Artificial Sequence
  Description of Artificial Sequence: Synthetic oligonucleotide
agccuggccacgggcccug

SEQ ID NO: 533 - RNA, 19 nt, Artificial Sequence
  Description of Artificial Sequence: Synthetic oligonucleotide
gccuggccacgggcccugc

SEQ ID NO: 534 - RNA, 19 nt, Artificial Sequence
  Description of Artificial Sequence: Synthetic oligonucleotide
ccuggccacgggcccugcu

SEQ ID NO: 535 - RNA, 19 nt, Artificial Sequence
  Description of Artificial Sequence: Synthetic oligonucleotide
cuggccacgggcccugcug

SEQ ID NO: 536 - RNA, 19 nt, Artificial Sequence
  Description of Artificial Sequence: Synthetic oligonucleotide
uggccacgggcccugcugg

SEQ ID NO: 537 - RNA, 19 nt, Artificial Sequence
  Description of Artificial Sequence: Synthetic oligonucleotide
ggccacgggcccugcugga

SEQ ID NO: 538 - RNA, 19 nt, Artificial Sequence
  Description of Artificial Sequence: Synthetic oligonucleotide
gccacgggcccugcuggag

SEQ ID NO: 539 - RNA, 19 nt, Artificial Sequence
  Description of Artificial Sequence: Synthetic oligonucleotide
ccacgggcccugcuggaga

SEQ ID NO: 540 - RNA, 19 nt, Artificial Sequence
  Description of Artificial Sequence: Synthetic oligonucleotide
cacgggcccugcuggagac

SEQ ID NO: 541 - RNA, 19 nt, Artificial Sequence
  Description of Artificial Sequence: Synthetic oligonucleotide
acgggcccugcuggagacc

SEQ ID NO: 542 - RNA, 19 nt, Artificial Sequence
  Description of Artificial Sequence: Synthetic oligonucleotide
cgggcccugcuggagaccc

SEQ ID NO: 543 - RNA, 19 nt, Artificial Sequence
  Description of Artificial Sequence: Synthetic oligonucleotide
gggcccugcuggagacccu

SEQ ID NO: 544 - RNA, 19 nt, Artificial Sequence
  Description of Artificial Sequence: Synthetic oligonucleotide
ggcccugcuggagacccug

SEQ ID NO: 545 - RNA, 19 nt, Artificial Sequence
  Description of Artificial Sequence: Synthetic oligonucleotide
gcccugcuggagacccugg

SEQ ID NO: 546 - RNA, 19 nt, Artificial Sequence
  Description of Artificial Sequence: Synthetic oligonucleotide
cccugcuggagacccuggc

SEQ ID NO: 547 - RNA, 19 nt, Artificial Sequence
  Description of Artificial Sequence: Synthetic oligonucleotide
ccugcuggagacccuggcu

SEQ ID NO: 548 - RNA, 19 nt, Artificial Sequence
  Description of Artificial Sequence: Synthetic oligonucleotide
cugcuggagacccuggcug

SEQ ID NO: 549 - RNA, 19 nt, Artificial Sequence
  Description of Artificial Sequence: Synthetic oligonucleotide
ugcuggagacccuggcugc

SEQ ID NO: 550 - RNA, 19 nt, Artificial Sequence
  Description of Artificial Sequence: Synthetic oligonucleotide
gcuggagacccuggcugcc

SEQ ID NO: 551 - RNA, 19 nt, Artificial Sequence
  Description of Artificial Sequence: Synthetic oligonucleotide
cuggagacccuggcugcca

SEQ ID NO: 552 - RNA, 19 nt, Artificial Sequence
  Description of Artificial Sequence: Synthetic oligonucleotide
uggagacccuggcugccag

SEQ ID NO: 553 - RNA, 19 nt, Artificial Sequence
  Description of Artificial Sequence: Synthetic oligonucleotide
ggagacccuggcugccaga

SEQ ID NO: 554 - RNA, 19 nt, Artificial Sequence
  Description of Artificial Sequence: Synthetic oligonucleotide
gagacccuggcugccagac

SEQ ID NO: 555 - RNA, 19 nt, Artificial Sequence
  Description of Artificial Sequence: Synthetic oligonucleotide
agacccuggcugccagacg

SEQ ID NO: 556 - RNA, 19 nt, Artificial Sequence
  Description of Artificial Sequence: Synthetic oligonucleotide
gacccuggcugccagacgu

SEQ ID NO: 557 - RNA, 19 nt, Artificial Sequence
  Description of Artificial Sequence: Synthetic oligonucleotide
acccuggcugccagacgug

SEQ ID NO: 558 - RNA, 19 nt, Artificial Sequence
  Description of Artificial Sequence: Synthetic oligonucleotide
cccuggcugccagacgugu

SEQ ID NO: 559 - RNA, 19 nt, Artificial Sequence
  Description of Artificial Sequence: Synthetic oligonucleotide
ccuggcugccagacgugug

SEQ ID NO: 560 - RNA, 19 nt, Artificial Sequence
  Description of Artificial Sequence: Synthetic oligonucleotide
cuggcugccagacgugugc

SEQ ID NO: 561 - RNA, 19 nt, Artificial Sequence
  Description of Artificial Sequence: Synthetic oligonucleotide
uggcugccagacgugugca

SEQ ID NO: 562 - RNA, 19 nt, Artificial Sequence
  Description of Artificial Sequence: Synthetic oligonucleotide
ggcugccagacgugugcag

SEQ ID NO: 563 - RNA, 19 nt, Artificial Sequence
  Description of Artificial Sequence: Synthetic oligonucleotide
gcugccagacgugugcagc

SEQ ID NO: 564 - RNA, 19 nt, Artificial Sequence
  Description of Artificial Sequence: Synthetic oligonucleotide
cugccagacgugugcagcc

SEQ ID NO: 565 - RNA, 19 nt, Artificial Sequence
  Description of Artificial Sequence: Synthetic oligonucleotide
ugccagacgugugcagccu

SEQ ID NO: 566 - RNA, 19 nt, Artificial Sequence
  Description of Artificial Sequence: Synthetic oligonucleotide
gccagacgugugcagccug

SEQ ID NO: 567 - RNA, 19 nt, Artificial Sequence
  Description of Artificial Sequence: Synthetic oligonucleotide
ccagacgugugcagccugu

SEQ ID NO: 568 - RNA, 19 nt, Artificial Sequence
  Description of Artificial Sequence: Synthetic oligonucleotide
cagacgugugcagccugug

SEQ ID NO: 569 - RNA, 19 nt, Artificial Sequence
  Description of Artificial Sequence: Synthetic oligonucleotide
agacgugugcagccugugg

SEQ ID NO: 570 - RNA, 19 nt, Artificial Sequence
  Description of Artificial Sequence: Synthetic oligonucleotide
gacgugugcagccuguggc

SEQ ID NO: 571 - RNA, 19 nt, Artificial Sequence
  Description of Artificial Sequence: Synthetic oligonucleotide
acgugugcagccuguggcc

SEQ ID NO: 572 - RNA, 19 nt, Artificial Sequence
  Description of Artificial Sequence: Synthetic oligonucleotide
cgugugcagccuguggccc

SEQ ID NO: 573 - RNA, 19 nt, Artificial Sequence
  Description of Artificial Sequence: Synthetic oligonucleotide
gugugcagccuguggccca

SEQ ID NO: 574 - RNA, 19 nt, Artificial Sequence
  Description of Artificial Sequence: Synthetic oligonucleotide
ugugcagccuguggcccag

SEQ ID NO: 575 - RNA, 19 nt, Artificial Sequence
  Description of Artificial Sequence: Synthetic oligonucleotide
gugcagccuguggcccagg

SEQ ID NO: 576 - RNA, 19 nt, Artificial Sequence
  Description of Artificial Sequence: Synthetic oligonucleotide
ugcagccuguggcccagga

SEQ ID NO: 577 - RNA, 19 nt, Artificial Sequence
  Description of Artificial Sequence: Synthetic oligonucleotide
gcagccuguggcccaggac

SEQ ID NO: 578 - RNA, 19 nt, Artificial Sequence
  Description of Artificial Sequence: Synthetic oligonucleotide
cagccuguggcccaggacc

SEQ ID NO: 579 - RNA, 19 nt, Artificial Sequence
  Description of Artificial Sequence: Synthetic oligonucleotide
agccuguggcccaggaccc

SEQ ID NO: 580 - RNA, 19 nt, Artificial Sequence
  Description of Artificial Sequence: Synthetic oligonucleotide
gccuguggcccaggacccc

SEQ ID NO: 581 - RNA, 19 nt, Artificial Sequence
  Description of Artificial Sequence: Synthetic oligonucleotide
ccuguggcccaggacccca

SEQ ID NO: 582 - RNA, 19 nt, Artificial Sequence
  Description of Artificial Sequence: Synthetic oligonucleotide
cuguggcccaggaccccac

SEQ ID NO: 583 - RNA, 19 nt, Artificial Sequence
  Description of Artificial Sequence: Synthetic oligonucleotide
uguggcccaggaccccacg

SEQ ID NO: 584 - RNA, 19 nt, Artificial Sequence
  Description of Artificial Sequence: Synthetic oligonucleotide
guggcccaggaccccacgg

SEQ ID NO: 585 - RNA, 19 nt, Artificial Sequence
  Description of Artificial Sequence: Synthetic oligonucleotide
uggcccaggaccccacggc

SEQ ID NO: 586 - RNA, 19 nt, Artificial Sequence
  Description of Artificial Sequence: Synthetic oligonucleotide
ggcccaggaccccacggcc

SEQ ID NO: 587 - RNA, 19 nt, Artificial Sequence
  Description of Artificial Sequence: Synthetic oligonucleotide
gcccaggaccccacggccc

SEQ ID NO: 588 - RNA, 19 nt, Artificial Sequence
  Description of Artificial Sequence: Synthetic oligonucleotide
cccaggaccccacggcccu

SEQ ID NO: 589 - RNA, 19 nt, Artificial Sequence
  Description of Artificial Sequence: Synthetic oligonucleotide
ccaggaccccacggcccuc

SEQ ID NO: 590 - RNA, 19 nt, Artificial Sequence
  Description of Artificial Sequence: Synthetic oligonucleotide
caggaccccacggcccucc

SEQ ID NO: 591 - RNA, 19 nt, Artificial Sequence
  Description of Artificial Sequence: Synthetic oligonucleotide
aggaccccacggcccuccc

SEQ ID NO: 592 - RNA, 19 nt, Artificial Sequence
  Description of Artificial Sequence: Synthetic oligonucleotide
ggaccccacggcccucccg

SEQ ID NO: 593 - RNA, 19 nt, Artificial Sequence
  Description of Artificial Sequence: Synthetic oligonucleotide
gaccccacggcccucccgg

SEQ ID NO: 594 - RNA, 19 nt, Artificial Sequence
  Description of Artificial Sequence: Synthetic oligonucleotide
accccacggcccucccggu

SEQ ID NO: 595 - RNA, 19 nt, Artificial Sequence
  Description of Artificial Sequence: Synthetic oligonucleotide
ccccacggcccucccggug

SEQ ID NO: 596 - RNA, 19 nt, Artificial Sequence
  Description of Artificial Sequence: Synthetic oligonucleotide
cccacggcccucccgguga

SEQ ID NO: 597 - RNA, 19 nt, Artificial Sequence
  Description of Artificial Sequence: Synthetic oligonucleotide
ccacggcccucccggugac

SEQ ID NO: 598 - RNA, 19 nt, Artificial Sequence
  Description of Artificial Sequence: Synthetic oligonucleotide
cacggcccucccggugaca

SEQ ID NO: 599 - RNA, 19 nt, Artificial Sequence
  Description of Artificial Sequence: Synthetic oligonucleotide
acggcccucccggugacac

SEQ ID NO: 600 - RNA, 19 nt, Artificial Sequence
  Description of Artificial Sequence: Synthetic oligonucleotide
cggcccucccggugacaca

SEQ ID NO: 601 - RNA, 19 nt, Artificial Sequence
  Description of Artificial Sequence: Synthetic oligonucleotide
ggcccucccggugacacag

SEQ ID NO: 602 - RNA, 19 nt, Artificial Sequence
  Description of Artificial Sequence: Synthetic oligonucleotide
gcccucccggugacacaga

SEQ ID NO: 603 - RNA, 19 nt, Artificial Sequence
  Description of Artificial Sequence: Synthetic oligonucleotide
cccucccggugacacagac

SEQ ID NO: 604 - RNA, 19 nt, Artificial Sequence
  Description of Artificial Sequence: Synthetic oligonucleotide
ccucccggugacacagaca

SEQ ID NO: 605 - RNA, 19 nt, Artificial Sequence
  Description of Artificial Sequence: Synthetic oligonucleotide
cucccggugacacagacac

SEQ ID NO: 606 - RNA, 19 nt, Artificial Sequence
  Description of Artificial Sequence: Synthetic oligonucleotide
ucccggugacacagacaca

SEQ ID NO: 607 - RNA, 19 nt, Artificial Sequence
  Description of Artificial Sequence: Synthetic oligonucleotide
cccggugacacagacacaa

SEQ ID NO: 608 - RNA, 19 nt, Artificial Sequence
  Description of Artificial Sequence: Synthetic oligonucleotide
ccggugacacagacacaaa

SEQ ID NO: 609 - RNA, 19 nt, Artificial Sequence
  Description of Artificial Sequence: Synthetic oligonucleotide
cggugacacagacacaaag

SEQ ID NO: 610 - RNA, 19 nt, Artificial Sequence
  Description of Artificial Sequence: Synthetic oligonucleotide
ggugacacagacacaaagg

SEQ ID NO: 611 - RNA, 19 nt, Artificial Sequence
  Description of Artificial Sequence: Synthetic oligonucleotide
gugacacagacacaaaggu

SEQ ID NO: 612 - RNA, 19 nt, Artificial Sequence
  Description of Artificial Sequence: Synthetic oligonucleotide
ugacacagacacaaaggug

SEQ ID NO: 613 - RNA, 19 nt, Artificial Sequence
  Description of Artificial Sequence: Synthetic oligonucleotide
gacacagacacaaaggugc

SEQ ID NO: 614 - RNA, 19 nt, Artificial Sequence
  Description of Artificial Sequence: Synthetic oligonucleotide
acacagacacaaaggugcu

SEQ ID NO: 615 - RNA, 19 nt, Artificial Sequence
  Description of Artificial Sequence: Synthetic oligonucleotide
cacagacacaaaggugcug

SEQ ID NO: 616 - RNA, 19 nt, Artificial Sequence
  Description of Artificial Sequence: Synthetic oligonucleotide
acagacacaaaggugcugg

SEQ ID NO: 617 - RNA, 19 nt, Artificial Sequence
  Description of Artificial Sequence: Synthetic oligonucleotide
cagacacaaaggugcuggu

SEQ ID NO: 618 - RNA, 19 nt, Artificial Sequence
  Description of Artificial Sequence: Synthetic oligonucleotide
agacacaaaggugcuggug

SEQ ID NO: 619 - RNA, 19 nt, Artificial Sequence
  Description of Artificial Sequence: Synthetic oligonucleotide
gacacaaaggugcuggugc

SEQ ID NO: 620 - RNA, 19 nt, Artificial Sequence
  Description of Artificial Sequence: Synthetic oligonucleotide
acacaaaggugcuggugcu

SEQ ID NO: 621 - RNA, 19 nt, Artificial Sequence
  Description of Artificial Sequence: Synthetic oligonucleotide
cacaaaggugcuggugcug

SEQ ID NO: 622 - RNA, 19 nt, Artificial Sequence
  Description of Artificial Sequence: Synthetic oligonucleotide
acaaaggugcuggugcugg

SEQ ID NO: 623 - RNA, 19 nt, Artificial Sequence
  Description of Artificial Sequence: Synthetic oligonucleotide
caaaggugcuggugcugga

SEQ ID NO: 624 - RNA, 19 nt, Artificial Sequence
  Description of Artificial Sequence: Synthetic oligonucleotide
aaaggugcuggugcuggau

SEQ ID NO: 625 - RNA, 19 nt, Artificial Sequence
  Description of Artificial Sequence: Synthetic oligonucleotide
aaggugcuggugcuggauc

SEQ ID NO: 626 - RNA, 19 nt, Artificial Sequence
  Description of Artificial Sequence: Synthetic oligonucleotide
aggugcuggugcuggaucc

SEQ ID NO: 627 - RNA, 19 nt, Artificial Sequence
  Description of Artificial Sequence: Synthetic oligonucleotide
ggugcuggugcuggauccc

SEQ ID NO: 628 - RNA, 19 nt, Artificial Sequence
  Description of Artificial Sequence: Synthetic oligonucleotide
gugcuggugcuggaucccg

SEQ ID NO: 629 - RNA, 19 nt, Artificial Sequence
  Description of Artificial Sequence: Synthetic oligonucleotide
ugcuggugcuggaucccgc

SEQ ID NO: 630 - RNA, 19 nt, Artificial Sequence
  Description of Artificial Sequence: Synthetic oligonucleotide
gcuggugcuggaucccgcg

SEQ ID NO: 631 - RNA, 19 nt, Artificial Sequence
  Description of Artificial Sequence: Synthetic oligonucleotide
cuggugcuggaucccgcgc

SEQ ID NO: 632 - RNA, 19 nt, Artificial Sequence
  Description of Artificial Sequence: Synthetic oligonucleotide
uggugcuggaucccgcgcu

SEQ ID NO: 633 - RNA, 19 nt, Artificial Sequence
  Description of Artificial Sequence: Synthetic oligonucleotide
ggugcuggaucccgcgcug

SEQ ID NO: 634 - RNA, 19 nt, Artificial Sequence
  Description of Artificial Sequence: Synthetic oligonucleotide
gugcuggaucccgcgcugc

SEQ ID NO: 635 - RNA, 19 nt, Artificial Sequence
  Description of Artificial Sequence: Synthetic oligonucleotide
ugcuggaucccgcgcugcc

SEQ ID NO: 636 - RNA, 19 nt, Artificial Sequence
  Description of Artificial Sequence: Synthetic oligonucleotide
gcuggaucccgcgcugccu

SEQ ID NO: 637 - RNA, 19 nt, Artificial Sequence
  Description of Artificial Sequence: Synthetic oligonucleotide
cuggaucccgcgcugccug

SEQ ID NO: 638 - RNA, 19 nt, Artificial Sequence
  Description of Artificial Sequence: Synthetic oligonucleotide
uggaucccgcgcugccugc

SEQ ID NO: 639 - RNA, 19 nt, Artificial Sequence
  Description of Artificial Sequence: Synthetic oligonucleotide
ggaucccgcgcugccugcg

SEQ ID NO: 640 - RNA, 19 nt, Artificial Sequence
  Description of Artificial Sequence: Synthetic oligonucleotide
gaucccgcgcugccugcgc

SEQ ID NO: 641 - RNA, 19 nt, Artificial Sequence
  Description of Artificial Sequence: Synthetic oligonucleotide
aucccgcgcugccugcgcu

SEQ ID NO: 642 - RNA, 19 nt, Artificial Sequence
  Description of Artificial Sequence: Synthetic oligonucleotide
ucccgcgcugccugcgcug

SEQ ID NO: 643 - RNA, 19 nt, Artificial Sequence
  Description of Artificial Sequence: Synthetic oligonucleotide
cccgcgcugccugcgcugg

SEQ ID NO: 644 - RNA, 19 nt, Artificial Sequence
  Description of Artificial Sequence: Synthetic oligonucleotide
ccgcgcugccugcgcuggu

SEQ ID NO: 645 - RNA, 19 nt, Artificial Sequence
  Description of Artificial Sequence: Synthetic oligonucleotide
cgcgcugccugcgcugguc

SEQ ID NO: 646 - RNA, 19 nt, Artificial Sequence
  Description of Artificial Sequence: Synthetic oligonucleotide
gcgcugccugcgcugguca

SEQ ID NO: 647 - RNA, 19 nt, Artificial Sequence
  Description of Artificial Sequence: Synthetic oligonucleotide
cgcugccugcgcuggucag

SEQ ID NO: 648 - RNA, 19 nt, Artificial Sequence
  Description of Artificial Sequence: Synthetic oligonucleotide
gcugccugcgcuggucagu

SEQ ID NO: 649 - RNA, 19 nt, Artificial Sequence
  Description of Artificial Sequence: Synthetic oligonucleotide
cugccugcgcuggucaguu

SEQ ID NO: 650 - RNA, 19 nt, Artificial Sequence
  Description of Artificial Sequence: Synthetic oligonucleotide
ugccugcgcuggucaguug

SEQ ID NO: 651 - RNA, 19 nt, Artificial Sequence
  Description of Artificial Sequence: Synthetic oligonucleotide
gccugcgcuggucaguugu

SEQ ID NO: 652 - RNA, 19 nt, Artificial Sequence
  Description of Artificial Sequence: Synthetic oligonucleotide
ccugcgcuggucaguugug

SEQ ID NO: 653 - RNA, 19 nt, Artificial Sequence
  Description of Artificial Sequence: Synthetic oligonucleotide
cugcgcuggucaguugugg

SEQ ID NO: 654 - RNA, 19 nt, Artificial Sequence
  Description of Artificial Sequence: Synthetic oligonucleotide
ugcgcuggucaguuguggc

SEQ ID NO: 655 - RNA, 19 nt, Artificial Sequence
  Description of Artificial Sequence: Synthetic oligonucleotide
gcgcuggucaguuguggcu

SEQ ID NO: 656 - RNA, 19 nt, Artificial Sequence
  Description of Artificial Sequence: Synthetic oligonucleotide
cgcuggucaguuguggcuc

SEQ ID NO: 657 - RNA, 19 nt, Artificial Sequence
  Description of Artificial Sequence: Synthetic oligonucleotide
gcuggucaguuguggcucc

SEQ ID NO: 658 - RNA, 19 nt, Artificial Sequence
  Description of Artificial Sequence: Synthetic oligonucleotide
cuggucaguuguggcucca

SEQ ID NO: 659 - RNA, 19 nt, Artificial Sequence
  Description of Artificial Sequence: Synthetic oligonucleotide
uggucaguuguggcuccag

SEQ ID NO: 660 - RNA, 19 nt, Artificial Sequence
  Description of Artificial Sequence: Synthetic oligonucleotide
ggucaguuguggcuccagc

SEQ ID NO: 661 - RNA, 19 nt, Artificial Sequence
  Description of Artificial Sequence: Synthetic oligonucleotide
gucaguuguggcuccagcc

SEQ ID NO: 662 - RNA, 19 nt, Artificial Sequence
  Description of Artificial Sequence: Synthetic oligonucleotide
ucaguuguggcuccagccu

SEQ ID NO: 663 - RNA, 19 nt, Artificial Sequence
  Description of Artificial Sequence: Synthetic oligonucleotide
caguuguggcuccagccug

SEQ ID NO: 664 - RNA, 19 nt, Artificial Sequence
  Description of Artificial Sequence: Synthetic oligonucleotide
aguuguggcuccagccugc

SEQ ID NO: 665 - RNA, 19 nt, Artificial Sequence
  Description of Artificial Sequence: Synthetic oligonucleotide
guuguggcuccagccugca

SEQ ID NO: 666 - RNA, 19 nt, Artificial Sequence
  Description of Artificial Sequence: Synthetic oligonucleotide
uuguggcuccagccugcag

SEQ ID NO: 667 - RNA, 19 nt, Artificial Sequence
  Description of Artificial Sequence: Synthetic oligonucleotide
uguggcuccagccugcagg

SEQ ID NO: 668 - RNA, 19 nt, Artificial Sequence
  Description of Artificial Sequence: Synthetic oligonucleotide
guggcuccagccugcaggg

SEQ ID NO: 669 - RNA, 19 nt, Artificial Sequence
  Description of Artificial Sequence: Synthetic oligonucleotide
uggcuccagccugcagggc

SEQ ID NO: 670 - RNA, 19 nt, Artificial Sequence
  Description of Artificial Sequence: Synthetic oligonucleotide
ggcuccagccugcagggcc

SEQ ID NO: 671 - RNA, 19 nt, Artificial Sequence
  Description of Artificial Sequence: Synthetic oligonucleotide
gcuccagccugcagggccg

SEQ ID NO: 672 - RNA, 19 nt, Artificial Sequence
  Description of Artificial Sequence: Synthetic oligonucleotide
cuccagccugcagggccgc

SEQ ID NO: 673 - RNA, 19 nt, Artificial Sequence
  Description of Artificial Sequence: Synthetic oligonucleotide
uccagccugcagggccgcu

SEQ ID NO: 674 - RNA, 19 nt, Artificial Sequence
  Description of Artificial Sequence: Synthetic oligonucleotide
ccagccugcagggccgcug

SEQ ID NO: 675 - RNA, 19 nt, Artificial Sequence
  Description of Artificial Sequence: Synthetic oligonucleotide
cagccugcagggccgcugc

SEQ ID NO: 676 - RNA, 19 nt, Artificial Sequence
  Description of Artificial Sequence: Synthetic oligonucleotide
agccugcagggccgcugcu

SEQ ID NO: 677 - RNA, 19 nt, Artificial Sequence
  Description of Artificial Sequence: Synthetic oligonucleotide
gccugcagggccgcugcuu

SEQ ID NO: 678 - RNA, 19 nt, Artificial Sequence
  Description of Artificial Sequence: Synthetic oligonucleotide
ccugcagggccgcugcuuc

SEQ ID NO: 679 - RNA, 19 nt, Artificial Sequence
  Description of Artificial Sequence: Synthetic oligonucleotide
cugcagggccgcugcuucc

SEQ ID NO: 680 - RNA, 19 nt, Artificial Sequence
  Description of Artificial Sequence: Synthetic oligonucleotide
ugcagggccgcugcuuccu

SEQ ID NO: 681 - RNA, 19 nt, Artificial Sequence
  Description of Artificial Sequence: Synthetic oligonucleotide
gcagggccgcugcuuccug

SEQ ID NO: 682 - RNA, 19 nt, Artificial Sequence
  Description of Artificial Sequence: Synthetic oligonucleotide
cagggccgcugcuuccugc

SEQ ID NO: 683 - RNA, 19 nt, Artificial Sequence
  Description of Artificial Sequence: Synthetic oligonucleotide
agggccgcugcuuccugca

SEQ ID NO: 684 - RNA, 19 nt, Artificial Sequence
  Description of Artificial Sequence: Synthetic oligonucleotide
gggccgcugcuuccugcau

SEQ ID NO: 685 - RNA, 19 nt, Artificial Sequence
  Description of Artificial Sequence: Synthetic oligonucleotide
ggccgcugcuuccugcaug

SEQ ID NO: 686 - RNA, 19 nt, Artificial Sequence
  Description of Artificial Sequence: Synthetic oligonucleotide
gccgcugcuuccugcauga

SEQ ID NO: 687 - RNA, 19 nt, Artificial Sequence
  Description of Artificial Sequence: Synthetic oligonucleotide
ccgcugcuuccugcaugac

SEQ ID NO: 688 - RNA, 19 nt, Artificial Sequence
  Description of Artificial Sequence: Synthetic oligonucleotide
cgcugcuuccugcaugacc

SEQ ID NO: 689 - RNA, 19 nt, Artificial Sequence
  Description of Artificial Sequence: Synthetic oligonucleotide
gcugcuuccugcaugaccu

SEQ ID NO: 690 - RNA, 19 nt, Artificial Sequence
  Description of Artificial Sequence: Synthetic oligonucleotide
cugcuuccugcaugaccua

SEQ ID NO: 691 - RNA, 19 nt, Artificial Sequence
  Description of Artificial Sequence: Synthetic oligonucleotide
ugcuuccugcaugaccuag

SEQ ID NO: 692 - RNA, 19 nt, Artificial Sequence
  Description of Artificial Sequence: Synthetic oligonucleotide
gcuuccugcaugaccuaga

SEQ ID NO: 693 - RNA, 19 nt, Artificial Sequence
  Description of Artificial Sequence: Synthetic oligonucleotide
cuuccugcaugaccuagag

SEQ ID NO: 694 - RNA, 19 nt, Artificial Sequence
  Description of Artificial Sequence: Synthetic oligonucleotide
uuccugcaugaccuagagc

SEQ ID NO: 695 - RNA, 19 nt, Artificial Sequence
  Description of Artificial Sequence: Synthetic oligonucleotide
uccugcaugaccuagagcc

SEQ ID NO: 696 - RNA, 19 nt, Artificial Sequence
  Description of Artificial Sequence: Synthetic oligonucleotide
ccugcaugaccuagagccc

SEQ ID NO: 697 - RNA, 19 nt, Artificial Sequence
  Description of Artificial Sequence: Synthetic oligonucleotide
cugcaugaccuagagcccc

SEQ ID NO: 698 - RNA, 19 nt, Artificial Sequence
  Description of Artificial Sequence: Synthetic oligonucleotide
ugcaugaccuagagcccca

SEQ ID NO: 699 - RNA, 19 nt, Artificial Sequence
  Description of Artificial Sequence: Synthetic oligonucleotide
gcaugaccuagagccccaa

SEQ ID NO: 700 - RNA, 19 nt, Artificial Sequence
  Description of Artificial Sequence: Synthetic oligonucleotide
caugaccuagagccccaag

SEQ ID NO: 701 - RNA, 19 nt, Artificial Sequence
  Description of Artificial Sequence: Synthetic oligonucleotide
augaccuagagccccaagg

SEQ ID NO: 702 - RNA, 19 nt, Artificial Sequence
  Description of Artificial Sequence: Synthetic oligonucleotide
ugaccuagagccccaaggg

SEQ ID NO: 703 - RNA, 19 nt, Artificial Sequence
  Description of Artificial Sequence: Synthetic oligonucleotide
gaccuagagccccaaggga

SEQ ID NO: 704 - RNA, 19 nt, Artificial Sequence
  Description of Artificial Sequence: Synthetic oligonucleotide
accuagagccccaagggac

SEQ ID NO: 705 - RNA, 19 nt, Artificial Sequence
  Description of Artificial Sequence: Synthetic oligonucleotide
ccuagagccccaagggaca

SEQ ID NO: 706 - RNA, 19 nt, Artificial Sequence
  Description of Artificial Sequence: Synthetic oligonucleotide
cuagagccccaagggacag

SEQ ID NO: 707 - RNA, 19 nt, Artificial Sequence
  Description of Artificial Sequence: Synthetic oligonucleotide
uagagccccaagggacagc

SEQ ID NO: 708 - RNA, 19 nt, Artificial Sequence
  Description of Artificial Sequence: Synthetic oligonucleotide
agagccccaagggacagcc

SEQ ID NO: 709 - RNA, 19 nt, Artificial Sequence
  Description of Artificial Sequence: Synthetic oligonucleotide
gagccccaagggacagccg

SEQ ID NO: 710 - RNA, 19 nt, Artificial Sequence
  Description of Artificial Sequence: Synthetic oligonucleotide
agccccaagggacagccgu

SEQ ID NO: 711 - RNA, 19 nt, Artificial Sequence
  Description of Artificial Sequence: Synthetic oligonucleotide
gccccaagggacagccgug

SEQ ID NO: 712 - RNA, 19 nt, Artificial Sequence
  Description of Artificial Sequence: Synthetic oligonucleotide
ccccaagggacagccgugc

SEQ ID NO: 713 - RNA, 19 nt, Artificial Sequence
  Description of Artificial Sequence: Synthetic oligonucleotide
cccaagggacagccgugca

SEQ ID NO: 714 - RNA, 19 nt, Artificial Sequence
  Description of Artificial Sequence: Synthetic oligonucleotide
ccaagggacagccgugcau

SEQ ID NO: 715 - RNA, 19 nt, Artificial Sequence
  Description of Artificial Sequence: Synthetic oligonucleotide
caagggacagccgugcauc

SEQ ID NO: 716 - RNA, 19 nt, Artificial Sequence
  Description of Artificial Sequence: Synthetic oligonucleotide
aagggacagccgugcaucu

SEQ ID NO: 717 - RNA, 19 nt, Artificial Sequence
  Description of Artificial Sequence: Synthetic oligonucleotide
agggacagccgugcaucug

SEQ ID NO: 718 - RNA, 19 nt, Artificial Sequence
  Description of Artificial Sequence: Synthetic oligonucleotide
gggacagccgugcaucugg

SEQ ID NO: 719 - RNA, 19 nt, Artificial Sequence
  Description of Artificial Sequence: Synthetic oligonucleotide
ggacagccgugcaucuggc

SEQ ID NO: 720 - RNA, 19 nt, Artificial Sequence
  Description of Artificial Sequence: Synthetic oligonucleotide
gacagccgugcaucuggca

SEQ ID NO: 721 - RNA, 19 nt, Artificial Sequence
  Description of Artificial Sequence: Synthetic oligonucleotide
acagccgugcaucuggcag

SEQ ID NO: 722 - RNA, 19 nt, Artificial Sequence
  Description of Artificial Sequence: Synthetic oligonucleotide
cagccgugcaucuggcagc

SEQ ID NO: 723 - RNA, 19 nt, Artificial Sequence
  Description of Artificial Sequence: Synthetic oligonucleotide
agccgugcaucuggcagcg

SEQ ID NO: 724 - RNA, 19 nt, Artificial Sequence
  Description of Artificial Sequence: Synthetic oligonucleotide
gccgugcaucuggcagcgc

SEQ ID NO: 725 - RNA, 19 nt, Artificial Sequence
  Description of Artificial Sequence: Synthetic oligonucleotide
ccgugcaucuggcagcgcc

SEQ ID NO: 726 - RNA, 19 nt, Artificial Sequence
  Description of Artificial Sequence: Synthetic oligonucleotide
cgugcaucuggcagcgcca

SEQ ID NO: 727 - RNA, 19 nt, Artificial Sequence
  Description of Artificial Sequence: Synthetic oligonucleotide
gugcaucuggcagcgccag

SEQ ID NO: 728 - RNA, 19 nt, Artificial Sequence
  Description of Artificial Sequence: Synthetic oligonucleotide
ugcaucuggcagcgccagc

SEQ ID NO: 729 - RNA, 19 nt, Artificial Sequence
  Description of Artificial Sequence: Synthetic oligonucleotide
gcaucuggcagcgccagcc

SEQ ID NO: 730 - RNA, 19 nt, Artificial Sequence
  Description of Artificial Sequence: Synthetic oligonucleotide
caucuggcagcgccagccu

SEQ ID NO: 731 - RNA, 19 nt, Artificial Sequence
  Description of Artificial Sequence: Synthetic oligonucleotide
aucuggcagcgccagccug

SEQ ID NO: 732 - RNA, 19 nt, Artificial Sequence
  Description of Artificial Sequence: Synthetic oligonucleotide
ucuggcagcgccagccugc

SEQ ID NO: 733 - RNA, 19 nt, Artificial Sequence
  Description of Artificial Sequence: Synthetic oligonucleotide
cuggcagcgccagccugcc

SEQ ID NO: 734 - RNA, 19 nt, Artificial Sequence
  Description of Artificial Sequence: Synthetic oligonucleotide
uggcagcgccagccugccu

SEQ ID NO: 735 - RNA, 19 nt, Artificial Sequence
  Description of Artificial Sequence: Synthetic oligonucleotide
ggcagcgccagccugccuc

SEQ ID NO: 736 - RNA, 19 nt, Artificial Sequence
  Description of Artificial Sequence: Synthetic oligonucleotide
gcagcgccagccugccucu

SEQ ID NO: 737 - RNA, 19 nt, Artificial Sequence
  Description of Artificial Sequence: Synthetic oligonucleotide
cagcgccagccugccucuu

SEQ ID NO: 738 - RNA, 19 nt, Artificial Sequence
  Description of Artificial Sequence: Synthetic oligonucleotide
agcgccagccugccucuuc

SEQ ID NO: 739 - RNA, 19 nt, Artificial Sequence
  Description of Artificial Sequence: Synthetic oligonucleotide
gcgccagccugccucuucu

SEQ ID NO: 740 - RNA, 19 nt, Artificial Sequence
  Description of Artificial Sequence: Synthetic oligonucleotide
cgccagccugccucuucuc

SEQ ID NO: 741 - RNA, 19 nt, Artificial Sequence
  Description of Artificial Sequence: Synthetic oligonucleotide
gccagccugccucuucuca

SEQ ID NO: 742 - RNA, 19 nt, Artificial Sequence
  Description of Artificial Sequence: Synthetic oligonucleotide
ccagccugccucuucucag

SEQ ID NO: 743 - RNA, 19 nt, Artificial Sequence
  Description of Artificial Sequence: Synthetic oligonucleotide
cagccugccucuucucagc

SEQ ID NO: 744 - RNA, 19 nt, Artificial Sequence
  Description of Artificial Sequence: Synthetic oligonucleotide
agccugccucuucucagcc

SEQ ID NO: 745 - RNA, 19 nt, Artificial Sequence
  Description of Artificial Sequence: Synthetic oligonucleotide
gccugccucuucucagccc

SEQ ID NO: 746 - RNA, 19 nt, Artificial Sequence
  Description of Artificial Sequence: Synthetic oligonucleotide
ccugccucuucucagccca

SEQ ID NO: 747 - RNA, 19 nt, Artificial Sequence
  Description of Artificial Sequence: Synthetic oligonucleotide
cugccucuucucagcccac

SEQ ID NO: 748 - RNA, 19 nt, Artificial Sequence
  Description of Artificial Sequence: Synthetic oligonucleotide
ugccucuucucagcccacc

SEQ ID NO: 749 - RNA, 19 nt, Artificial Sequence
  Description of Artificial Sequence: Synthetic oligonucleotide
gccucuucucagcccacca

SEQ ID NO: 750 - RNA, 19 nt, Artificial Sequence
  Description of Artificial Sequence: Synthetic oligonucleotide
ccucuucucagcccaccau

SEQ ID NO: 751 - RNA, 19 nt, Artificial Sequence
  Description of Artificial Sequence: Synthetic oligonucleotide
cucuucucagcccaccaua

SEQ ID NO: 752 - RNA, 19 nt, Artificial Sequence
  Description of Artificial Sequence: Synthetic oligonucleotide
ucuucucagcccaccauaa

SEQ ID NO: 753 - RNA, 19 nt, Artificial Sequence
  Description of Artificial Sequence: Synthetic oligonucleotide
cuucucagcccaccauaac

SEQ ID NO: 754 - RNA, 19 nt, Artificial Sequence
  Description of Artificial Sequence: Synthetic oligonucleotide
uucucagcccaccauaacc

SEQ ID NO: 755 - RNA, 19 nt, Artificial Sequence
  Description of Artificial Sequence: Synthetic oligonucleotide
ucucagcccaccauaaccg

SEQ ID NO: 756 - RNA, 19 nt, Artificial Sequence
  Description of Artificial Sequence: Synthetic oligonucleotide
cucagcccaccauaaccgg

SEQ ID NO: 757 - RNA, 19 nt, Artificial Sequence
  Description of Artificial Sequence: Synthetic oligonucleotide
ucagcccaccauaaccggc

SEQ ID NO: 758 - RNA, 19 nt, Artificial Sequence
  Description of Artificial Sequence: Synthetic oligonucleotide
cagcccaccauaaccggcc

SEQ ID NO: 759 - RNA, 19 nt, Artificial Sequence
  Description of Artificial Sequence: Synthetic oligonucleotide
agcccaccauaaccggccc

SEQ ID NO: 760 - RNA, 19 nt, Artificial Sequence
  Description of Artificial Sequence: Synthetic oligonucleotide
gcccaccauaaccggcccg

SEQ ID NO: 761 - RNA, 19 nt, Artificial Sequence
  Description of Artificial Sequence: Synthetic oligonucleotide
cccaccauaaccggcccga

SEQ ID NO: 762 - RNA, 19 nt, Artificial Sequence
  Description of Artificial Sequence: Synthetic oligonucleotide
ccaccauaaccggcccgau

SEQ ID NO: 763 - RNA, 19 nt, Artificial Sequence
  Description of Artificial Sequence: Synthetic oligonucleotide
caccauaaccggcccgaug

SEQ ID NO: 764 - RNA, 19 nt, Artificial Sequence
  Description of Artificial Sequence: Synthetic oligonucleotide
accauaaccggcccgauga

SEQ ID NO: 765 - RNA, 19 nt, Artificial Sequence
  Description of Artificial Sequence: Synthetic oligonucleotide
ccauaaccggcccgaugac

SEQ ID NO: 766 - RNA, 19 nt, Artificial Sequence
  Description of Artificial Sequence: Synthetic oligonucleotide
cauaaccggcccgaugacu

SEQ ID NO: 767 - RNA, 19 nt, Artificial Sequence
  Description of Artificial Sequence: Synthetic oligonucleotide
auaaccggcccgaugacug

SEQ ID NO: 768 - RNA, 19 nt, Artificial Sequence
  Description of Artificial Sequence: Synthetic oligonucleotide
uaaccggcccgaugacugc

SEQ ID NO: 769 - RNA, 19 nt, Artificial Sequence
  Description of Artificial Sequence: Synthetic oligonucleotide
aaccggcccgaugacugcc

SEQ ID NO: 770 - RNA, 19 nt, Artificial Sequence
  Description of Artificial Sequence: Synthetic oligonucleotide
accggcccgaugacugccc

SEQ ID NO: 771 - RNA, 19 nt, Artificial Sequence
  Description of Artificial Sequence: Synthetic oligonucleotide
ccggcccgaugacugcccc

SEQ ID NO: 772 - RNA, 19 nt, Artificial Sequence
  Description of Artificial Sequence: Synthetic oligonucleotide
cggcccgaugacugccccg

SEQ ID NO: 773 - RNA, 19 nt, Artificial Sequence
  Description of Artificial Sequence: Synthetic oligonucleotide
ggcccgaugacugccccga

SEQ ID NO: 774 - RNA, 19 nt, Artificial Sequence
  Description of Artificial Sequence: Synthetic oligonucleotide
gcccgaugacugccccgac

SEQ ID NO: 775 - RNA, 19 nt, Artificial Sequence
  Description of Artificial Sequence: Synthetic oligonucleotide
cccgaugacugccccgacu

SEQ ID NO: 776 - RNA, 19 nt, Artificial Sequence
  Description of Artificial Sequence: Synthetic oligonucleotide
ccgaugacugccccgacug

SEQ ID NO: 777 - RNA, 19 nt, Artificial Sequence
  Description of Artificial Sequence: Synthetic oligonucleotide
cgaugacugccccgacugu

SEQ ID NO: 778 - RNA, 19 nt, Artificial Sequence
  Description of Artificial Sequence: Synthetic oligonucleotide
gaugacugccccgacugug

SEQ ID NO: 779 - RNA, 19 nt, Artificial Sequence
  Description of Artificial Sequence: Synthetic oligonucleotide
augacugccccgacugugu

SEQ ID NO: 780 - RNA, 19 nt, Artificial Sequence
  Description of Artificial Sequence: Synthetic oligonucleotide
ugacugccccgacugugug

SEQ ID NO: 781 - RNA, 19 nt, Artificial Sequence
  Description of Artificial Sequence: Synthetic oligonucleotide
gacugccccgacugugugg

SEQ ID NO: 782 - RNA, 19 nt, Artificial Sequence
  Description of Artificial Sequence: Synthetic oligonucleotide
acugccccgacuguguggc

SEQ ID NO: 783 - RNA, 19 nt, Artificial Sequence
  Description of Artificial Sequence: Synthetic oligonucleotide
cugccccgacuguguggcc

SEQ ID NO: 784 - RNA, 19 nt, Artificial Sequence
  Description of Artificial Sequence: Synthetic oligonucleotide
ugccccgacuguguggcca

SEQ ID NO: 785 - RNA, 19 nt, Artificial Sequence
  Description of Artificial Sequence: Synthetic oligonucleotide
gccccgacuguguggccag

SEQ ID NO: 786 - RNA, 19 nt, Artificial Sequence
  Description of Artificial Sequence: Synthetic oligonucleotide
ccccgacuguguggccagc

SEQ ID NO: 787 - RNA, 19 nt, Artificial Sequence
  Description of Artificial Sequence: Synthetic oligonucleotide
cccgacuguguggccagcc

SEQ ID NO: 788 - RNA, 19 nt, Artificial Sequence
  Description of Artificial Sequence: Synthetic oligonucleotide
ccgacuguguggccagccc

SEQ ID NO: 789 - RNA, 19 nt, Artificial Sequence
  Description of Artificial Sequence: Synthetic oligonucleotide
cgacuguguggccagccca

SEQ ID NO: 790 - RNA, 19 nt, Artificial Sequence
  Description of Artificial Sequence: Synthetic oligonucleotide
gacuguguggccagcccau

SEQ ID NO: 791 - RNA, 19 nt, Artificial Sequence
  Description of Artificial Sequence: Synthetic oligonucleotide
acuguguggccagcccauu

SEQ ID NO: 792 - RNA, 19 nt, Artificial Sequence
  Description of Artificial Sequence: Synthetic oligonucleotide
cuguguggccagcccauug

SEQ ID NO: 793 - RNA, 19 nt, Artificial Sequence
  Description of Artificial Sequence: Synthetic oligonucleotide
uguguggccagcccauugg

SEQ ID NO: 794 - RNA, 19 nt, Artificial Sequence
  Description of Artificial Sequence: Synthetic oligonucleotide
guguggccagcccauuggg

SEQ ID NO: 795 - RNA, 19 nt, Artificial Sequence
  Description of Artificial Sequence: Synthetic oligonucleotide
uguggccagcccauugggc

SEQ ID NO: 796 - RNA, 19 nt, Artificial Sequence
  Description of Artificial Sequence: Synthetic oligonucleotide
guggccagcccauugggca

SEQ ID NO: 797 - RNA, 19 nt, Artificial Sequence
  Description of Artificial Sequence: Synthetic oligonucleotide
uggccagcccauugggcac

SEQ ID NO: 798 - RNA, 19 nt, Artificial Sequence
  Description of Artificial Sequence: Synthetic oligonucleotide
ggccagcccauugggcacc

SEQ ID NO: 799 - RNA, 19 nt, Artificial Sequence
  Description of Artificial Sequence: Synthetic oligonucleotide
gccagcccauugggcaccc

SEQ ID NO: 800 - RNA, 19 nt, Artificial Sequence
  Description of Artificial Sequence: Synthetic oligonucleotide
ccagcccauugggcacccg

SEQ ID NO: 801 - RNA, 19 nt, Artificial Sequence
  Description of Artificial Sequence: Synthetic oligonucleotide
cagcccauugggcacccgu

SEQ ID NO: 802 - RNA, 19 nt, Artificial Sequence
  Description of Artificial Sequence: Synthetic oligonucleotide
agcccauugggcacccgug

SEQ ID NO: 803 - RNA, 19 nt, Artificial Sequence
  Description of Artificial Sequence: Synthetic oligonucleotide
gcccauugggcacccgugu

SEQ ID NO: 804 - RNA, 19 nt, Artificial Sequence
  Description of Artificial Sequence: Synthetic oligonucleotide
cccauugggcacccgugua

SEQ ID NO: 805 - RNA, 19 nt, Artificial Sequence
  Description of Artificial Sequence: Synthetic oligonucleotide
ccauugggcacccguguaa

SEQ ID NO: 806 - RNA, 19 nt, Artificial Sequence
  Description of Artificial Sequence: Synthetic oligonucleotide
cauugggcacccguguaac

SEQ ID NO: 807 - RNA, 19 nt, Artificial Sequence
  Description of Artificial Sequence: Synthetic oligonucleotide
auugggcacccguguaacu

SEQ ID NO: 808 - RNA, 19 nt, Artificial Sequence
  Description of Artificial Sequence: Synthetic oligonucleotide
uugggcacccguguaacug

SEQ ID NO: 809 - RNA, 19 nt, Artificial Sequence
  Description of Artificial Sequence: Synthetic oligonucleotide
ugggcacccguguaacugu

SEQ ID NO: 810 - RNA, 19 nt, Artificial Sequence
  Description of Artificial Sequence: Synthetic oligonucleotide
gggcacccguguaacugug

SEQ ID NO: 811 - RNA, 19 nt, Artificial Sequence
  Description of Artificial Sequence: Synthetic oligonucleotide
ggcacccguguaacugugg

SEQ ID NO: 812 - RNA, 19 nt, Artificial Sequence
  Description of Artificial Sequence: Synthetic oligonucleotide
gcacccguguaacuguggu

SEQ ID NO: 813 - RNA, 19 nt, Artificial Sequence
  Description of Artificial Sequence: Synthetic oligonucleotide
cacccguguaacugugguu

SEQ ID NO: 814 - RNA, 19 nt, Artificial Sequence
  Description of Artificial Sequence: Synthetic oligonucleotide
acccguguaacugugguug

SEQ ID NO: 815 - RNA, 19 nt, Artificial Sequence
  Description of Artificial Sequence: Synthetic oligonucleotide
cccguguaacugugguuga

SEQ ID NO: 816 - RNA, 19 nt, Artificial Sequence
  Description of Artificial Sequence: Synthetic oligonucleotide
ccguguaacugugguugag

SEQ ID NO: 817 - RNA, 19 nt, Artificial Sequence
  Description of Artificial Sequence: Synthetic oligonucleotide
cguguaacugugguugagc

SEQ ID NO: 818 - RNA, 19 nt, Artificial Sequence
  Description of Artificial Sequence: Synthetic oligonucleotide
guguaacugugguugagca

SEQ ID NO: 819 - RNA, 19 nt, Artificial Sequence
  Description of Artificial Sequence: Synthetic oligonucleotide
uguaacugugguugagcaa

SEQ ID NO: 820 - RNA, 19 nt, Artificial Sequence
  Description of Artificial Sequence: Synthetic oligonucleotide
guaacugugguugagcaag

SEQ ID NO: 821 - RNA, 19 nt, Artificial Sequence
  Description of Artificial Sequence: Synthetic oligonucleotide
uaacugugguugagcaagg

SEQ ID NO: 822 - RNA, 19 nt, Artificial Sequence
  Description of Artificial Sequence: Synthetic oligonucleotide
aacugugguugagcaaggc

SEQ ID NO: 823 - RNA, 19 nt, Artificial Sequence
  Description of Artificial Sequence: Synthetic oligonucleotide
acugugguugagcaaggcc

SEQ ID NO: 824 - RNA, 19 nt, Artificial Sequence
  Description of Artificial Sequence: Synthetic oligonucleotide
cugugguugagcaaggcca

SEQ ID NO: 825 - RNA, 19 nt, Artificial Sequence
  Description of Artificial Sequence: Synthetic oligonucleotide
ugugguugagcaaggccag

SEQ ID NO: 826 - RNA, 19 nt, Artificial Sequence
  Description of Artificial Sequence: Synthetic oligonucleotide
gugguugagcaaggccagg

SEQ ID NO: 827 - RNA, 19 nt, Artificial Sequence
  Description of Artificial Sequence: Synthetic oligonucleotide
ugguugagcaaggccaggc

SEQ ID NO: 828 - RNA, 19 nt, Artificial Sequence
  Description of Artificial Sequence: Synthetic oligonucleotide
gguugagcaaggccaggcc

SEQ ID NO: 829 - RNA, 19 nt, Artificial Sequence
  Description of Artificial Sequence: Synthetic oligonucleotide
guugagcaaggccaggccu

SEQ ID NO: 830 - RNA, 19 nt, Artificial Sequence
  Description of Artificial Sequence: Synthetic oligonucleotide
uugagcaaggccaggccuc

SEQ ID NO: 831 - RNA, 19 nt, Artificial Sequence
  Description of Artificial Sequence: Synthetic oligonucleotide
ugagcaaggccaggccucc

SEQ ID NO: 832 - RNA, 19 nt, Artificial Sequence
  Description of Artificial Sequence: Synthetic oligonucleotide
gagcaaggccaggccuccu

SEQ ID NO: 833 - RNA, 19 nt, Artificial Sequence
  Description of Artificial Sequence: Synthetic oligonucleotide
agcaaggccaggccuccua

SEQ ID NO: 834 - RNA, 19 nt, Artificial Sequence
  Description of Artificial Sequence: Synthetic oligonucleotide
gcaaggccaggccuccuau

SEQ ID NO: 835 - RNA, 19 nt, Artificial Sequence
  Description of Artificial Sequence: Synthetic oligonucleotide
caaggccaggccuccuauu

SEQ ID NO: 836 - RNA, 19 nt, Artificial Sequence
  Description of Artificial Sequence: Synthetic oligonucleotide
aaggccaggccuccuauuu

SEQ ID NO: 837 - RNA, 19 nt, Artificial Sequence
  Description of Artificial Sequence: Synthetic oligonucleotide
aggccaggccuccuauuuc

SEQ ID NO: 838 - RNA, 19 nt, Artificial Sequence
  Description of Artificial Sequence: Synthetic oligonucleotide
ggccaggccuccuauuucu

SEQ ID NO: 839 - RNA, 19 nt, Artificial Sequence
  Description of Artificial Sequence: Synthetic oligonucleotide
gccaggccuccuauuucua

SEQ ID NO: 840 - RNA, 19 nt, Artificial Sequence
  Description of Artificial Sequence: Synthetic oligonucleotide
ccaggccuccuauuucuac

SEQ ID NO: 841 - RNA, 19 nt, Artificial Sequence
  Description of Artificial Sequence: Synthetic oligonucleotide
caggccuccuauuucuacg

SEQ ID NO: 842 - RNA, 19 nt, Artificial Sequence
  Description of Artificial Sequence: Synthetic oligonucleotide
aggccuccuauuucuacgu

SEQ ID NO: 843 - RNA, 19 nt, Artificial Sequence
  Description of Artificial Sequence: Synthetic oligonucleotide
ggccuccuauuucuacgug

SEQ ID NO: 844 - RNA, 19 nt, Artificial Sequence
  Description of Artificial Sequence: Synthetic oligonucleotide
gccuccuauuucuacgugg

SEQ ID NO: 845 - RNA, 19 nt, Artificial Sequence
  Description of Artificial Sequence: Synthetic oligonucleotide
ccuccuauuucuacguggc

SEQ ID NO: 846 - RNA, 19 nt, Artificial Sequence
  Description of Artificial Sequence: Synthetic oligonucleotide
cuccuauuucuacguggca

SEQ ID NO: 847 - RNA, 19 nt, Artificial Sequence
  Description of Artificial Sequence: Synthetic oligonucleotide
uccuauuucuacguggcau

SEQ ID NO: 848 - RNA, 19 nt, Artificial Sequence
  Description of Artificial Sequence: Synthetic oligonucleotide
ccuauuucuacguggcauc

SEQ ID NO: 849 - RNA, 19 nt, Artificial Sequence
  Description of Artificial Sequence: Synthetic oligonucleotide
cuauuucuacguggcaucc

SEQ ID NO: 850 - RNA, 19 nt, Artificial Sequence
  Description of Artificial Sequence: Synthetic oligonucleotide
uauuucuacguggcauccu

SEQ ID NO: 851 - RNA, 19 nt, Artificial Sequence
  Description of Artificial Sequence: Synthetic oligonucleotide
auuucuacguggcauccuc

SEQ ID NO: 852 - RNA, 19 nt, Artificial Sequence
  Description of Artificial Sequence: Synthetic oligonucleotide
uuucuacguggcauccuca

SEQ ID NO: 853 - RNA, 19 nt, Artificial Sequence
  Description of Artificial Sequence: Synthetic oligonucleotide
uucuacguggcauccucac

SEQ ID NO: 854 - RNA, 19 nt, Artificial Sequence
  Description of Artificial Sequence: Synthetic oligonucleotide
ucuacguggcauccucacu

SEQ ID NO: 855 - RNA, 19 nt, Artificial Sequence
  Description of Artificial Sequence: Synthetic oligonucleotide
cuacguggcauccucacug

SEQ ID NO: 856 - RNA, 19 nt, Artificial Sequence
  Description of Artificial Sequence: Synthetic oligonucleotide
uacguggcauccucacugg

SEQ ID NO: 857 - RNA, 19 nt, Artificial Sequence
  Description of Artificial Sequence: Synthetic oligonucleotide
acguggcauccucacugga

SEQ ID NO: 858 - RNA, 19 nt, Artificial Sequence
  Description of Artificial Sequence: Synthetic oligonucleotide
cguggcauccucacuggac

SEQ ID NO: 859 - RNA, 19 nt, Artificial Sequence
  Description of Artificial Sequence: Synthetic oligonucleotide
guggcauccucacuggacg

SEQ ID NO: 860 - RNA, 19 nt, Artificial Sequence
  Description of Artificial Sequence: Synthetic oligonucleotide
uggcauccucacuggacgc

SEQ ID NO: 861 - RNA, 19 nt, Artificial Sequence
  Description of Artificial Sequence: Synthetic oligonucleotide
ggcauccucacuggacgca

SEQ ID NO: 862 - RNA, 19 nt, Artificial Sequence
  Description of Artificial Sequence: Synthetic oligonucleotide
gcauccucacuggacgcag

SEQ ID NO: 863 - RNA, 19 nt, Artificial Sequence
  Description of Artificial Sequence: Synthetic oligonucleotide
cauccucacuggacgcagc

SEQ ID NO: 864 - RNA, 19 nt, Artificial Sequence
  Description of Artificial Sequence: Synthetic oligonucleotide
auccucacuggacgcagcc

SEQ ID NO: 865 - RNA, 19 nt, Artificial Sequence
  Description of Artificial Sequence: Synthetic oligonucleotide
uccucacuggacgcagccg

SEQ ID NO: 866 - RNA, 19 nt, Artificial Sequence
  Description of Artificial Sequence: Synthetic oligonucleotide
ccucacuggacgcagccgu

SEQ ID NO: 867 - RNA, 19 nt, Artificial Sequence
  Description of Artificial Sequence: Synthetic oligonucleotide
cucacuggacgcagccgug

SEQ ID NO: 868 - RNA, 19 nt, Artificial Sequence
  Description of Artificial Sequence: Synthetic oligonucleotide
ucacuggacgcagccgugg

SEQ ID NO: 869 - RNA, 19 nt, Artificial Sequence
  Description of Artificial Sequence: Synthetic oligonucleotide
cacuggacgcagccguggc

SEQ ID NO: 870 - RNA, 19 nt, Artificial Sequence
  Description of Artificial Sequence: Synthetic oligonucleotide
acuggacgcagccguggcu

SEQ ID NO: 871 - RNA, 19 nt, Artificial Sequence
  Description of Artificial Sequence: Synthetic oligonucleotide
cuggacgcagccguggcug

SEQ ID NO: 872 - RNA, 19 nt, Artificial Sequence
  Description of Artificial Sequence: Synthetic oligonucleotide
uggacgcagccguggcugc

SEQ ID NO: 873 - RNA, 19 nt, Artificial Sequence
  Description of Artificial Sequence: Synthetic oligonucleotide
ggacgcagccguggcugcc

SEQ ID NO: 874 - RNA, 19 nt, Artificial Sequence
  Description of Artificial Sequence: Synthetic oligonucleotide
gacgcagccguggcugcca

SEQ ID NO: 875 - RNA, 19 nt, Artificial Sequence
  Description of Artificial Sequence: Synthetic oligonucleotide
acgcagccguggcugccag

SEQ ID NO: 876 - RNA, 19 nt, Artificial Sequence
  Description of Artificial Sequence: Synthetic oligonucleotide
cgcagccguggcugccagc

SEQ ID NO: 877 - RNA, 19 nt, Artificial Sequence
  Description of Artificial Sequence: Synthetic oligonucleotide
gcagccguggcugccagcu

SEQ ID NO: 878 - RNA, 19 nt, Artificial Sequence
  Description of Artificial Sequence: Synthetic oligonucleotide
cagccguggcugccagcuu

SEQ ID NO: 879 - RNA, 19 nt, Artificial Sequence
  Description of Artificial Sequence: Synthetic oligonucleotide
agccguggcugccagcuuc

SEQ ID NO: 880 - RNA, 19 nt, Artificial Sequence
  Description of Artificial Sequence: Synthetic oligonucleotide
gccguggcugccagcuuca

SEQ ID NO: 881 - RNA, 19 nt, Artificial Sequence
  Description of Artificial Sequence: Synthetic oligonucleotide
ccguggcugccagcuucag

SEQ ID NO: 882 - RNA, 19 nt, Artificial Sequence
  Description of Artificial Sequence: Synthetic oligonucleotide
cguggcugccagcuucagc

SEQ ID NO: 883 - RNA, 19 nt, Artificial Sequence
  Description of Artificial Sequence: Synthetic oligonucleotide
guggcugccagcuucagcc

SEQ ID NO: 884 - RNA, 19 nt, Artificial Sequence
  Description of Artificial Sequence: Synthetic oligonucleotide
uggcugccagcuucagccc

SEQ ID NO: 885 - RNA, 19 nt, Artificial Sequence
  Description of Artificial Sequence: Synthetic oligonucleotide
ggcugccagcuucagccca

SEQ ID NO: 886 - RNA, 19 nt, Artificial Sequence
  Description of Artificial Sequence: Synthetic oligonucleotide
gcugccagcuucagcccac

SEQ ID NO: 887 - RNA, 19 nt, Artificial Sequence
  Description of Artificial Sequence: Synthetic oligonucleotide
cugccagcuucagcccacg

SEQ ID NO: 888 - RNA, 19 nt, Artificial Sequence
  Description of Artificial Sequence: Synthetic oligonucleotide
ugccagcuucagcccacgc

SEQ ID NO: 889 - RNA, 19 nt, Artificial Sequence
  Description of Artificial Sequence: Synthetic oligonucleotide
gccagcuucagcccacgcu

SEQ ID NO: 890 - RNA, 19 nt, Artificial Sequence
  Description of Artificial Sequence: Synthetic oligonucleotide
ccagcuucagcccacgcuc

SEQ ID NO: 891 - RNA, 19 nt, Artificial Sequence
  Description of Artificial Sequence: Synthetic oligonucleotide
cagcuucagcccacgcuca

SEQ ID NO: 892 - RNA, 19 nt, Artificial Sequence
  Description of Artificial Sequence: Synthetic oligonucleotide
agcuucagcccacgcucag

SEQ ID NO: 893 - RNA, 19 nt, Artificial Sequence
  Description of Artificial Sequence: Synthetic oligonucleotide
gcuucagcccacgcucagu

SEQ ID NO: 894 - RNA, 19 nt, Artificial Sequence
  Description of Artificial Sequence: Synthetic oligonucleotide
cuucagcccacgcucagug

SEQ ID NO: 895 - RNA, 19 nt, Artificial Sequence
  Description of Artificial Sequence: Synthetic oligonucleotide
uucagcccacgcucagugu

SEQ ID NO: 896 - RNA, 19 nt, Artificial Sequence
  Description of Artificial Sequence: Synthetic oligonucleotide
ucagcccacgcucaguguc

SEQ ID NO: 897 - RNA, 19 nt, Artificial Sequence
  Description of Artificial Sequence: Synthetic oligonucleotide
cagcccacgcucagugucu

SEQ ID NO: 898 - RNA, 19 nt, Artificial Sequence
  Description of Artificial Sequence: Synthetic oligonucleotide
agcccacgcucagugucua

SEQ ID NO: 899 - RNA, 19 nt, Artificial Sequence
  Description of Artificial Sequence: Synthetic oligonucleotide
gcccacgcucagugucuau

SEQ ID NO: 900 - RNA, 19 nt, Artificial Sequence
  Description of Artificial Sequence: Synthetic oligonucleotide
cccacgcucagugucuauc

SEQ ID NO: 901 - RNA, 19 nt, Artificial Sequence
  Description of Artificial Sequence: Synthetic oligonucleotide
ccacgcucagugucuauca

SEQ ID NO: 902 - RNA, 19 nt, Artificial Sequence
  Description of Artificial Sequence: Synthetic oligonucleotide
cacgcucagugucuaucag

SEQ ID NO: 903 - RNA, 19 nt, Artificial Sequence
  Description of Artificial Sequence: Synthetic oligonucleotide
acgcucagugucuaucagg

SEQ ID NO: 904 - RNA, 19 nt, Artificial Sequence
  Description of Artificial Sequence: Synthetic oligonucleotide
cgcucagugucuaucaggc

SEQ ID NO: 905 - RNA, 19 nt, Artificial Sequence
  Description of Artificial Sequence: Synthetic oligonucleotide
gcucagugucuaucaggcg

SEQ ID NO: 906 - RNA, 19 nt, Artificial Sequence
  Description of Artificial Sequence: Synthetic oligonucleotide
cucagugucuaucaggcgu

SEQ ID NO: 907 - RNA, 19 nt, Artificial Sequence
  Description of Artificial Sequence: Synthetic oligonucleotide
ucagugucuaucaggcguc

SEQ ID NO: 908 - RNA, 19 nt, Artificial Sequence
  Description of Artificial Sequence: Synthetic oligonucleotide
cagugucuaucaggcgucu

SEQ ID NO: 909 - RNA, 19 nt, Artificial Sequence
  Description of Artificial Sequence: Synthetic oligonucleotide
agugucuaucaggcgucuc

SEQ ID NO: 910 - RNA, 19 nt, Artificial Sequence
  Description of Artificial Sequence: Synthetic oligonucleotide
gugucuaucaggcgucuca

SEQ ID NO: 911 - RNA, 19 nt, Artificial Sequence
  Description of Artificial Sequence: Synthetic oligonucleotide
ugucuaucaggcgucucaa

SEQ ID NO: 912 - RNA, 19 nt, Artificial Sequence
  Description of Artificial Sequence: Synthetic oligonucleotide
gucuaucaggcgucucaag

SEQ ID NO: 913 - RNA, 19 nt, Artificial Sequence
  Description of Artificial Sequence: Synthetic oligonucleotide
ucuaucaggcgucucaagg

SEQ ID NO: 914 - RNA, 19 nt, Artificial Sequence
  Description of Artificial Sequence: Synthetic oligonucleotide
cuaucaggcgucucaaggc

SEQ ID NO: 915 - RNA, 19 nt, Artificial Sequence
  Description of Artificial Sequence: Synthetic oligonucleotide
uaucaggcgucucaaggcu

SEQ ID NO: 916 - RNA, 19 nt, Artificial Sequence
  Description of Artificial Sequence: Synthetic oligonucleotide
aucaggcgucucaaggcug

SEQ ID NO: 917 - RNA, 19 nt, Artificial Sequence
  Description of Artificial Sequence: Synthetic oligonucleotide
ucaggcgucucaaggcuga

SEQ ID NO: 918 - RNA, 19 nt, Artificial Sequence
  Description of Artificial Sequence: Synthetic oligonucleotide
caggcgucucaaggcugac

SEQ ID NO: 919 - RNA, 19 nt, Artificial Sequence
  Description of Artificial Sequence: Synthetic oligonucleotide
aggcgucucaaggcugacg

SEQ ID NO: 920 - RNA, 19 nt, Artificial Sequence
  Description of Artificial Sequence: Synthetic oligonucleotide
ggcgucucaaggcugacgc

SEQ ID NO: 921 - RNA, 19 nt, Artificial Sequence
  Description of Artificial Sequence: Synthetic oligonucleotide
gcgucucaaggcugacgcc

SEQ ID NO: 922 - RNA, 19 nt, Artificial Sequence
  Description of Artificial Sequence: Synthetic oligonucleotide
cgucucaaggcugacgccu

SEQ ID NO: 923 - RNA, 19 nt, Artificial Sequence
  Description of Artificial Sequence: Synthetic oligonucleotide
gucucaaggcugacgccuc

SEQ ID NO: 924 - RNA, 19 nt, Artificial Sequence
  Description of Artificial Sequence: Synthetic oligonucleotide
ucucaaggcugacgccucg

SEQ ID NO: 925 - RNA, 19 nt, Artificial Sequence
  Description of Artificial Sequence: Synthetic oligonucleotide
cucaaggcugacgccucgg

SEQ ID NO: 926 - RNA, 19 nt, Artificial Sequence
  Description of Artificial Sequence: Synthetic oligonucleotide
ucaaggcugacgccucggg

SEQ ID NO: 927 - RNA, 19 nt, Artificial Sequence
  Description of Artificial Sequence: Synthetic oligonucleotide
caaggcugacgccucggga

SEQ ID NO: 928 - RNA, 19 nt, Artificial Sequence
  Description of Artificial Sequence: Synthetic oligonucleotide
aaggcugacgccucgggau

SEQ ID NO: 929 - RNA, 19 nt, Artificial Sequence
  Description of Artificial Sequence: Synthetic oligonucleotide
aggcugacgccucgggauu

SEQ ID NO: 930 - RNA, 19 nt, Artificial Sequence
  Description of Artificial Sequence: Synthetic oligonucleotide
ggcugacgccucgggauuc

SEQ ID NO: 931 - RNA, 19 nt, Artificial Sequence
  Description of Artificial Sequence: Synthetic oligonucleotide
gcugacgccucgggauucg

SEQ ID NO: 932 - RNA, 19 nt, Artificial Sequence
  Description of Artificial Sequence: Synthetic oligonucleotide
cugacgccucgggauucgc

SEQ ID NO: 933 - RNA, 19 nt, Artificial Sequence
  Description of Artificial Sequence: Synthetic oligonucleotide
ugacgccucgggauucgca

SEQ ID NO: 934 - RNA, 19 nt, Artificial Sequence
  Description of Artificial Sequence: Synthetic oligonucleotide
gacgccucgggauucgcac

SEQ ID NO: 935 - RNA, 19 nt, Artificial Sequence
  Description of Artificial Sequence: Synthetic oligonucleotide
acgccucgggauucgcacc

SEQ ID NO: 936 - RNA, 19 nt, Artificial Sequence
  Description of Artificial Sequence: Synthetic oligonucleotide
cgccucgggauucgcaccg

SEQ ID NO: 937 - RNA, 19 nt, Artificial Sequence
  Description of Artificial Sequence: Synthetic oligonucleotide
gccucgggauucgcaccgg

SEQ ID NO: 938 - RNA, 19 nt, Artificial Sequence
  Description of Artificial Sequence: Synthetic oligonucleotide
ccucgggauucgcaccggg

SEQ ID NO: 939 - RNA, 19 nt, Artificial Sequence
  Description of Artificial Sequence: Synthetic oligonucleotide
cucgggauucgcaccgggc

SEQ ID NO: 940 - RNA, 19 nt, Artificial Sequence
  Description of Artificial Sequence: Synthetic oligonucleotide
ucgggauucgcaccgggcu

SEQ ID NO: 941 - RNA, 19 nt, Artificial Sequence
  Description of Artificial Sequence: Synthetic oligonucleotide
cgggauucgcaccgggcuu

SEQ ID NO: 942 - RNA, 19 nt, Artificial Sequence
  Description of Artificial Sequence: Synthetic oligonucleotide
gggauucgcaccgggcuuu

SEQ ID NO: 943 - RNA, 19 nt, Artificial Sequence
  Description of Artificial Sequence: Synthetic oligonucleotide
ggauucgcaccgggcuuug

SEQ ID NO: 944 - RNA, 19 nt, Artificial Sequence
  Description of Artificial Sequence: Synthetic oligonucleotide
gauucgcaccgggcuuugu

SEQ ID NO: 945 - RNA, 19 nt, Artificial Sequence
  Description of Artificial Sequence: Synthetic oligonucleotide
auucgcaccgggcuuugug

SEQ ID NO: 946 - RNA, 19 nt, Artificial Sequence
  Description of Artificial Sequence: Synthetic oligonucleotide
uucgcaccgggcuuugugg

SEQ ID NO: 947 - RNA, 19 nt, Artificial Sequence
  Description of Artificial Sequence: Synthetic oligonucleotide
ucgcaccgggcuuuguggc

SEQ ID NO: 948 - RNA, 19 nt, Artificial Sequence
  Description of Artificial Sequence: Synthetic oligonucleotide
cgcaccgggcuuuguggcg

SEQ ID NO: 949 - RNA, 19 nt, Artificial Sequence
  Description of Artificial Sequence: Synthetic oligonucleotide
gcaccgggcuuuguggcgu

SEQ ID NO: 950 - RNA, 19 nt, Artificial Sequence
  Description of Artificial Sequence: Synthetic oligonucleotide
caccgggcuuuguggcguu

SEQ ID NO: 951 - RNA, 19 nt, Artificial Sequence
  Description of Artificial Sequence: Synthetic oligonucleotide
accgggcuuuguggcguug

SEQ ID NO: 952 - RNA, 19 nt, Artificial Sequence
  Description of Artificial Sequence: Synthetic oligonucleotide
ccgggcuuuguggcguugu

SEQ ID NO: 953 - RNA, 19 nt, Artificial Sequence
  Description of Artificial Sequence: Synthetic oligonucleotide
cgggcuuuguggcguuguc

SEQ ID NO: 954 - RNA, 19 nt, Artificial Sequence
  Description of Artificial Sequence: Synthetic oligonucleotide
gggcuuuguggcguuguca

SEQ ID NO: 955 - RNA, 19 nt, Artificial Sequence
  Description of Artificial Sequence: Synthetic oligonucleotide
ggcuuuguggcguugucag

SEQ ID NO: 956 - RNA, 19 nt, Artificial Sequence
  Description of Artificial Sequence: Synthetic oligonucleotide
gcuuuguggcguugucagu

SEQ ID NO: 957 - RNA, 19 nt, Artificial Sequence
  Description of Artificial Sequence: Synthetic oligonucleotide
cuuuguggcguugucagug

SEQ ID NO: 958 - RNA, 19 nt, Artificial Sequence
  Description of Artificial Sequence: Synthetic oligonucleotide
uuuguggcguugucagugc

SEQ ID NO: 959 - RNA, 19 nt, Artificial Sequence
  Description of Artificial Sequence: Synthetic oligonucleotide
uuguggcguugucagugcu

SEQ ID NO: 960 - RNA, 19 nt, Artificial Sequence
  Description of Artificial Sequence: Synthetic oligonucleotide
uguggcguugucagugcug

SEQ ID NO: 961 - RNA, 19 nt, Artificial Sequence
  Description of Artificial Sequence: Synthetic oligonucleotide
guggcguugucagugcugc

SEQ ID NO: 962 - RNA, 19 nt, Artificial Sequence
  Description of Artificial Sequence: Synthetic oligonucleotide
uggcguugucagugcugcc

SEQ ID NO: 963 - RNA, 19 nt, Artificial Sequence
  Description of Artificial Sequence: Synthetic oligonucleotide
ggcguugucagugcugccc

SEQ ID NO: 964 - RNA, 19 nt, Artificial Sequence
  Description of Artificial Sequence: Synthetic oligonucleotide
gcguugucagugcugccca

SEQ ID NO: 965 - RNA, 19 nt, Artificial Sequence
  Description of Artificial Sequence: Synthetic oligonucleotide
cguugucagugcugcccaa

SEQ ID NO: 966 - RNA, 19 nt, Artificial Sequence
  Description of Artificial Sequence: Synthetic oligonucleotide
guugucagugcugcccaag

SEQ ID NO: 967 - RNA, 19 nt, Artificial Sequence
  Description of Artificial Sequence: Synthetic oligonucleotide
uugucagugcugcccaagc

SEQ ID NO: 968 - RNA, 19 nt, Artificial Sequence
  Description of Artificial Sequence: Synthetic oligonucleotide
ugucagugcugcccaagca

SEQ ID NO: 969 - RNA, 19 nt, Artificial Sequence
  Description of Artificial Sequence: Synthetic oligonucleotide
gucagugcugcccaagcau

SEQ ID NO: 970 - RNA, 19 nt, Artificial Sequence
  Description of Artificial Sequence: Synthetic oligonucleotide
ucagugcugcccaagcauc

SEQ ID NO: 971 - RNA, 19 nt, Artificial Sequence
  Description of Artificial Sequence: Synthetic oligonucleotide
cagugcugcccaagcaucu

SEQ ID NO: 972 - RNA, 19 nt, Artificial Sequence
  Description of Artificial Sequence: Synthetic oligonucleotide
agugcugcccaagcaucuu

SEQ ID NO: 973 - RNA, 19 nt, Artificial Sequence
  Description of Artificial Sequence: Synthetic oligonucleotide
gugcugcccaagcaucuug

SEQ ID NO: 974 - RNA, 19 nt, Artificial Sequence
  Description of Artificial Sequence: Synthetic oligonucleotide
ugcugcccaagcaucuugu

SEQ ID NO: 975 - RNA, 19 nt, Artificial Sequence
  Description of Artificial Sequence: Synthetic oligonucleotide
gcugcccaagcaucuuguc

SEQ ID NO: 976 - RNA, 19 nt, Artificial Sequence
  Description of Artificial Sequence: Synthetic oligonucleotide
cugcccaagcaucuugucu

SEQ ID NO: 977 - RNA, 19 nt, Artificial Sequence
  Description of Artificial Sequence: Synthetic oligonucleotide
ugcccaagcaucuugucuc

SEQ ID NO: 978 - RNA, 19 nt, Artificial Sequence
  Description of Artificial Sequence: Synthetic oligonucleotide
gcccaagcaucuugucucc

SEQ ID NO: 979 - RNA, 19 nt, Artificial Sequence
  Description of Artificial Sequence: Synthetic oligonucleotide
cccaagcaucuugucuccu

SEQ ID NO: 980 - RNA, 19 nt, Artificial Sequence
  Description of Artificial Sequence: Synthetic oligonucleotide
ccaagcaucuugucuccua

SEQ ID NO: 981 - RNA, 19 nt, Artificial Sequence
  Description of Artificial Sequence: Synthetic oligonucleotide
caagcaucuugucuccuac

SEQ ID NO: 982 - RNA, 19 nt, Artificial Sequence
  Description of Artificial Sequence: Synthetic oligonucleotide
aagcaucuugucuccuaca

SEQ ID NO: 983 - RNA, 19 nt, Artificial Sequence
  Description of Artificial Sequence: Synthetic oligonucleotide
agcaucuugucuccuacag

SEQ ID NO: 984 - RNA, 19 nt, Artificial Sequence
  Description of Artificial Sequence: Synthetic oligonucleotide
gcaucuugucuccuacagu

SEQ ID NO: 985 - RNA, 19 nt, Artificial Sequence
  Description of Artificial Sequence: Synthetic oligonucleotide
caucuugucuccuacagua

SEQ ID NO: 986 - RNA, 19 nt, Artificial Sequence
  Description of Artificial Sequence: Synthetic oligonucleotide
aucuugucuccuacaguau

SEQ ID NO: 987 - RNA, 19 nt, Artificial Sequence
  Description of Artificial Sequence: Synthetic oligonucleotide
ucuugucuccuacaguauu

SEQ ID NO: 988 - RNA, 19 nt, Artificial Sequence
  Description of Artificial Sequence: Synthetic oligonucleotide
cuugucuccuacaguauug

SEQ ID NO: 989 - RNA, 19 nt, Artificial Sequence
  Description of Artificial Sequence: Synthetic oligonucleotide
uugucuccuacaguauuga

SEQ ID NO: 990 - RNA, 19 nt, Artificial Sequence
  Description of Artificial Sequence: Synthetic oligonucleotide
ugucuccuacaguauugaa

SEQ ID NO: 991 - RNA, 19 nt, Artificial Sequence
  Description of Artificial Sequence: Synthetic oligonucleotide
gucuccuacaguauugaau

SEQ ID NO: 992 - RNA, 19 nt, Artificial Sequence
  Description of Artificial Sequence: Synthetic oligonucleotide
ucuccuacaguauugaaua

SEQ ID NO: 993 - RNA, 19 nt, Artificial Sequence
  Description of Artificial Sequence: Synthetic oligonucleotide
cuccuacaguauugaauac

SEQ ID NO: 994 - RNA, 19 nt, Artificial Sequence
  Description of Artificial Sequence: Synthetic oligonucleotide
uccuacaguauugaauacg

SEQ ID NO: 995 - RNA, 19 nt, Artificial Sequence
  Description of Artificial Sequence: Synthetic oligonucleotide
ccuacaguauugaauacgu

SEQ ID NO: 996 - RNA, 19 nt, Artificial Sequence
  Description of Artificial Sequence: Synthetic oligonucleotide
cuacaguauugaauacgug

SEQ ID NO: 997 - RNA, 19 nt, Artificial Sequence
  Description of Artificial Sequence: Synthetic oligonucleotide
uacaguauugaauacgugc

SEQ ID NO: 998 - RNA, 19 nt, Artificial Sequence
  Description of Artificial Sequence: Synthetic oligonucleotide
acaguauugaauacgugca

SEQ ID NO: 999 - RNA, 19 nt, Artificial Sequence
  Description of Artificial Sequence: Synthetic oligonucleotide
caguauugaauacgugcac

SEQ ID NO: 1000 - RNA, 19 nt, Artificial Sequence
  Description of Artificial Sequence: Synthetic oligonucleotide
aguauugaauacgugcaca

SEQ ID NO: 1001 - RNA, 19 nt, Artificial Sequence
  Description of Artificial Sequence: Synthetic oligonucleotide
guauugaauacgugcacag

SEQ ID NO: 1002 - RNA, 19 nt, Artificial Sequence
  Description of Artificial Sequence: Synthetic oligonucleotide
uauugaauacgugcacagc

SEQ ID NO: 1003 - RNA, 19 nt, Artificial Sequence
  Description of Artificial Sequence: Synthetic oligonucleotide
auugaauacgugcacagcu

SEQ ID NO: 1004 - RNA, 19 nt, Artificial Sequence
  Description of Artificial Sequence: Synthetic oligonucleotide
uugaauacgugcacagcuu

SEQ ID NO: 1005 - RNA, 19 nt, Artificial Sequence
  Description of Artificial Sequence: Synthetic oligonucleotide
ugaauacgugcacagcuuc

SEQ ID NO: 1006 - RNA, 19 nt, Artificial Sequence
  Description of Artificial Sequence: Synthetic oligonucleotide
gaauacgugcacagcuucc

SEQ ID NO: 1007 - RNA, 19 nt, Artificial Sequence
  Description of Artificial Sequence: Synthetic oligonucleotide
aauacgugcacagcuucca

SEQ ID NO: 1008 - RNA, 19 nt, Artificial Sequence
  Description of Artificial Sequence: Synthetic oligonucleotide
auacgugcacagcuuccac

SEQ ID NO: 1009 - RNA, 19 nt, Artificial Sequence
  Description of Artificial Sequence: Synthetic oligonucleotide
uacgugcacagcuuccaca

SEQ ID NO: 1010 - RNA, 19 nt, Artificial Sequence
  Description of Artificial Sequence: Synthetic oligonucleotide
acgugcacagcuuccacac

SEQ ID NO: 1011 - RNA, 19 nt, Artificial Sequence
  Description of Artificial Sequence: Synthetic oligonucleotide
cgugcacagcuuccacacg

SEQ ID NO: 1012 - RNA, 19 nt, Artificial Sequence
  Description of Artificial Sequence: Synthetic oligonucleotide
gugcacagcuuccacacgg

SEQ ID NO: 1013 - RNA, 19 nt, Artificial Sequence
  Description of Artificial Sequence: Synthetic oligonucleotide
ugcacagcuuccacacggg

SEQ ID NO: 1014 - RNA, 19 nt, Artificial Sequence
  Description of Artificial Sequence: Synthetic oligonucleotide
gcacagcuuccacacggga

SEQ ID NO: 1015 - RNA, 19 nt, Artificial Sequence
  Description of Artificial Sequence: Synthetic oligonucleotide
cacagcuuccacacgggag

SEQ ID NO: 1016 - RNA, 19 nt, Artificial Sequence
  Description of Artificial Sequence: Synthetic oligonucleotide
acagcuuccacacgggagc

SEQ ID NO: 1017 - RNA, 19 nt, Artificial Sequence
  Description of Artificial Sequence: Synthetic oligonucleotide
cagcuuccacacgggagcc

SEQ ID NO: 1018 - RNA, 19 nt, Artificial Sequence
  Description of Artificial Sequence: Synthetic oligonucleotide
agcuuccacacgggagccu

SEQ ID NO: 1019 - RNA, 19 nt, Artificial Sequence
  Description of Artificial Sequence: Synthetic oligonucleotide
gcuuccacacgggagccuu

SEQ ID NO: 1020 - RNA, 19 nt, Artificial Sequence
  Description of Artificial Sequence: Synthetic oligonucleotide
cuuccacacgggagccuuc

SEQ ID NO: 1021 - RNA, 19 nt, Artificial Sequence
  Description of Artificial Sequence: Synthetic oligonucleotide
uuccacacgggagccuucg

SEQ ID NO: 1022 - RNA, 19 nt, Artificial Sequence
  Description of Artificial Sequence: Synthetic oligonucleotide
uccacacgggagccuucgu

SEQ ID NO: 1023 - RNA, 19 nt, Artificial Sequence
  Description of Artificial Sequence: Synthetic oligonucleotide
ccacacgggagccuucgua

SEQ ID NO: 1024 - RNA, 19 nt, Artificial Sequence
  Description of Artificial Sequence: Synthetic oligonucleotide
cacacgggagccuucguau

SEQ ID NO: 1025 - RNA, 19 nt, Artificial Sequence
  Description of Artificial Sequence: Synthetic oligonucleotide
acacgggagccuucguaua

SEQ ID NO: 1026 - RNA, 19 nt, Artificial Sequence
  Description of Artificial Sequence: Synthetic oligonucleotide
cacgggagccuucguauac

SEQ ID NO: 1027 - RNA, 19 nt, Artificial Sequence
  Description of Artificial Sequence: Synthetic oligonucleotide
acgggagccuucguauacu

SEQ ID NO: 1028 - RNA, 19 nt, Artificial Sequence
  Description of Artificial Sequence: Synthetic oligonucleotide
cgggagccuucguauacuu

SEQ ID NO: 1029 - RNA, 19 nt, Artificial Sequence
  Description of Artificial Sequence: Synthetic oligonucleotide
gggagccuucguauacuuc

SEQ ID NO: 1030 - RNA, 19 nt, Artificial Sequence
  Description of Artificial Sequence: Synthetic oligonucleotide
ggagccuucguauacuucc

SEQ ID NO: 1031 - RNA, 19 nt, Artificial Sequence
  Description of Artificial Sequence: Synthetic oligonucleotide
gagccuucguauacuuccu

SEQ ID NO: 1032 - RNA, 19 nt, Artificial Sequence
  Description of Artificial Sequence: Synthetic oligonucleotide
agccuucguauacuuccug

SEQ ID NO: 1033 - RNA, 19 nt, Artificial Sequence
  Description of Artificial Sequence: Synthetic oligonucleotide
gccuucguauacuuccuga

SEQ ID NO: 1034 - RNA, 19 nt, Artificial Sequence
  Description of Artificial Sequence: Synthetic oligonucleotide
ccuucguauacuuccugac

SEQ ID NO: 1035 - RNA, 19 nt, Artificial Sequence
  Description of Artificial Sequence: Synthetic oligonucleotide
cuucguauacuuccugacu

SEQ ID NO: 1036 - RNA, 19 nt, Artificial Sequence
  Description of Artificial Sequence: Synthetic oligonucleotide
uucguauacuuccugacug

SEQ ID NO: 1037 - RNA, 19 nt, Artificial Sequence
  Description of Artificial Sequence: Synthetic oligonucleotide
ucguauacuuccugacugu

SEQ ID NO: 1038 - RNA, 19 nt, Artificial Sequence
  Description of Artificial Sequence: Synthetic oligonucleotide
cguauacuuccugacugua

SEQ ID NO: 1039 - RNA, 19 nt, Artificial Sequence
  Description of Artificial Sequence: Synthetic oligonucleotide
guauacuuccugacuguac

SEQ ID NO: 1040 - RNA, 19 nt, Artificial Sequence
  Description of Artificial Sequence: Synthetic oligonucleotide
uauacuuccugacuguaca

SEQ ID NO: 1041 - RNA, 19 nt, Artificial Sequence
  Description of Artificial Sequence: Synthetic oligonucleotide
auacuuccugacuguacag

SEQ ID NO: 1042 - RNA, 19 nt, Artificial Sequence
  Description of Artificial Sequence: Synthetic oligonucleotide
uacuuccugacuguacagc

SEQ ID NO: 1043 - RNA, 19 nt, Artificial Sequence
  Description of Artificial Sequence: Synthetic oligonucleotide
acuuccugacuguacagcc

SEQ ID NO: 1044 - RNA, 19 nt, Artificial Sequence
  Description of Artificial Sequence: Synthetic oligonucleotide
cuuccugacuguacagccg

SEQ ID NO: 1045 - RNA, 19 nt, Artificial Sequence
  Description of Artificial Sequence: Synthetic oligonucleotide
uuccugacuguacagccgg

SEQ ID NO: 1046 - RNA, 19 nt, Artificial Sequence
  Description of Artificial Sequence: Synthetic oligonucleotide
uccugacuguacagccggc

SEQ ID NO: 1047 - RNA, 19 nt, Artificial Sequence
  Description of Artificial Sequence: Synthetic oligonucleotide
ccugacuguacagccggcc

SEQ ID NO: 1048 - RNA, 19 nt, Artificial Sequence
  Description of Artificial Sequence: Synthetic oligonucleotide
cugacuguacagccggcca

SEQ ID NO: 1049 - RNA, 19 nt, Artificial Sequence
  Description of Artificial Sequence: Synthetic oligonucleotide
ugacuguacagccggccag

SEQ ID NO: 1050 - RNA, 19 nt, Artificial Sequence
  Description of Artificial Sequence: Synthetic oligonucleotide
gacuguacagccggccagc

SEQ ID NO: 1051 - RNA, 19 nt, Artificial Sequence
  Description of Artificial Sequence: Synthetic oligonucleotide
acuguacagccggccagcg

SEQ ID NO: 1052 - RNA, 19 nt, Artificial Sequence
  Description of Artificial Sequence: Synthetic oligonucleotide
cuguacagccggccagcgu

SEQ ID NO: 1053 - RNA, 19 nt, Artificial Sequence
  Description of Artificial Sequence: Synthetic oligonucleotide
uguacagccggccagcgug

SEQ ID NO: 1054 - RNA, 19 nt, Artificial Sequence
  Description of Artificial Sequence: Synthetic oligonucleotide
guacagccggccagcguga

SEQ ID NO: 1055 - RNA, 19 nt, Artificial Sequence
  Description of Artificial Sequence: Synthetic oligonucleotide
uacagccggccagcgugac

SEQ ID NO: 1056 - RNA, 19 nt, Artificial Sequence
  Description of Artificial Sequence: Synthetic oligonucleotide
acagccggccagcgugaca

SEQ ID NO: 1057 - RNA, 19 nt, Artificial Sequence
  Description of Artificial Sequence: Synthetic oligonucleotide
cagccggccagcgugacag

SEQ ID NO: 1058 - RNA, 19 nt, Artificial Sequence
  Description of Artificial Sequence: Synthetic oligonucleotide
agccggccagcgugacaga

SEQ ID NO: 1059 - RNA, 19 nt, Artificial Sequence
  Description of Artificial Sequence: Synthetic oligonucleotide
gccggccagcgugacagau

SEQ ID NO: 1060 - RNA, 19 nt, Artificial Sequence
  Description of Artificial Sequence: Synthetic oligonucleotide
ccggccagcgugacagaug

SEQ ID NO: 1061 - RNA, 19 nt, Artificial Sequence
  Description of Artificial Sequence: Synthetic oligonucleotide
cggccagcgugacagauga

SEQ ID NO: 1062 - RNA, 19 nt, Artificial Sequence
  Description of Artificial Sequence: Synthetic oligonucleotide
ggccagcgugacagaugau

SEQ ID NO: 1063 - RNA, 19 nt, Artificial Sequence
  Description of Artificial Sequence: Synthetic oligonucleotide
gccagcgugacagaugauc

SEQ ID NO: 1064 - RNA, 19 nt, Artificial Sequence
  Description of Artificial Sequence: Synthetic oligonucleotide
ccagcgugacagaugaucc

SEQ ID NO: 1065 - RNA, 19 nt, Artificial Sequence
  Description of Artificial Sequence: Synthetic oligonucleotide
cagcgugacagaugauccu

SEQ ID NO: 1066 - RNA, 19 nt, Artificial Sequence
  Description of Artificial Sequence: Synthetic oligonucleotide
agcgugacagaugauccua

SEQ ID NO: 1067 - RNA, 19 nt, Artificial Sequence
  Description of Artificial Sequence: Synthetic oligonucleotide
gcgugacagaugauccuag

SEQ ID NO: 1068 - RNA, 19 nt, Artificial Sequence
  Description of Artificial Sequence: Synthetic oligonucleotide
cgugacagaugauccuagu

SEQ ID NO: 1069 - RNA, 19 nt, Artificial Sequence
  Description of Artificial Sequence: Synthetic oligonucleotide
gugacagaugauccuagug

SEQ ID NO: 1070 - RNA, 19 nt, Artificial Sequence
  Description of Artificial Sequence: Synthetic oligonucleotide
ugacagaugauccuagugc

SEQ ID NO: 1071 - RNA, 19 nt, Artificial Sequence
  Description of Artificial Sequence: Synthetic oligonucleotide
gacagaugauccuagugcc

SEQ ID NO: 1072 - RNA, 19 nt, Artificial Sequence
  Description of Artificial Sequence: Synthetic oligonucleotide
acagaugauccuagugccc

SEQ ID NO: 1073 - RNA, 19 nt, Artificial Sequence
  Description of Artificial Sequence: Synthetic oligonucleotide
cagaugauccuagugcccu

SEQ ID NO: 1074 - RNA, 19 nt, Artificial Sequence
  Description of Artificial Sequence: Synthetic oligonucleotide
agaugauccuagugcccug

SEQ ID NO: 1075 - RNA, 19 nt, Artificial Sequence
  Description of Artificial Sequence: Synthetic oligonucleotide
gaugauccuagugcccugc

SEQ ID NO: 1076 - RNA, 19 nt, Artificial Sequence
  Description of Artificial Sequence: Synthetic oligonucleotide
augauccuagugcccugca

SEQ ID NO: 1077 - RNA, 19 nt, Artificial Sequence
  Description of Artificial Sequence: Synthetic oligonucleotide
ugauccuagugcccugcac

SEQ ID NO: 1078 - RNA, 19 nt, Artificial Sequence
  Description of Artificial Sequence: Synthetic oligonucleotide
gauccuagugcccugcaca

SEQ ID NO: 1079 - RNA, 19 nt, Artificial Sequence
  Description of Artificial Sequence: Synthetic oligonucleotide
auccuagugcccugcacac

SEQ ID NO: 1080 - RNA, 19 nt, Artificial Sequence
  Description of Artificial Sequence: Synthetic oligonucleotide
uccuagugcccugcacaca

SEQ ID NO: 1081 - RNA, 19 nt, Artificial Sequence
  Description of Artificial Sequence: Synthetic oligonucleotide
ccuagugcccugcacacac

SEQ ID NO: 1082 - RNA, 19 nt, Artificial Sequence
  Description of Artificial Sequence: Synthetic oligonucleotide
cuagugcccugcacacacg

SEQ ID NO: 1083 - RNA, 19 nt, Artificial Sequence
  Description of Artificial Sequence: Synthetic oligonucleotide
uagugcccugcacacacgc

SEQ ID NO: 1084 - RNA, 19 nt, Artificial Sequence
  Description of Artificial Sequence: Synthetic oligonucleotide
agugcccugcacacacgcc

SEQ ID NO: 1085 - RNA, 19 nt, Artificial Sequence
  Description of Artificial Sequence: Synthetic oligonucleotide
gugcccugcacacacgccu

SEQ ID NO: 1086 - RNA, 19 nt, Artificial Sequence
  Description of Artificial Sequence: Synthetic oligonucleotide
ugcccugcacacacgccug

SEQ ID NO: 1087 - RNA, 19 nt, Artificial Sequence
  Description of Artificial Sequence: Synthetic oligonucleotide
gcccugcacacacgccugg

SEQ ID NO: 1088 - RNA, 19 nt, Artificial Sequence
  Description of Artificial Sequence: Synthetic oligonucleotide
cccugcacacacgccuggc

SEQ ID NO: 1089 - RNA, 19 nt, Artificial Sequence
  Description of Artificial Sequence: Synthetic oligonucleotide
ccugcacacacgccuggca

SEQ ID NO: 1090 - RNA, 19 nt, Artificial Sequence
  Description of Artificial Sequence: Synthetic oligonucleotide
cugcacacacgccuggcac

SEQ ID NO: 1091 - RNA, 19 nt, Artificial Sequence
  Description of Artificial Sequence: Synthetic oligonucleotide
ugcacacacgccuggcacg

SEQ ID NO: 1092 - RNA, 19 nt, Artificial Sequence
  Description of Artificial Sequence: Synthetic oligonucleotide
gcacacacgccuggcacgg

SEQ ID NO: 1093 - RNA, 19 nt, Artificial Sequence
  Description of Artificial Sequence: Synthetic oligonucleotide
cacacacgccuggcacggc

SEQ ID NO: 1094 - RNA, 19 nt, Artificial Sequence
  Description of Artificial Sequence: Synthetic oligonucleotide
acacacgccuggcacggcu

SEQ ID NO: 1095 - RNA, 19 nt, Artificial Sequence
  Description of Artificial Sequence: Synthetic oligonucleotide
cacacgccuggcacggcuu

SEQ ID NO: 1096 - RNA, 19 nt, Artificial Sequence
  Description of Artificial Sequence: Synthetic oligonucleotide
acacgccuggcacggcuua

SEQ ID NO: 1097 - RNA, 19 nt, Artificial Sequence
  Description of Artificial Sequence: Synthetic oligonucleotide
cacgccuggcacggcuuag

SEQ ID NO: 1098 - RNA, 19 nt, Artificial Sequence
  Description of Artificial Sequence: Synthetic oligonucleotide
acgccuggcacggcuuagc

SEQ ID NO: 1099 - RNA, 19 nt, Artificial Sequence
  Description of Artificial Sequence: Synthetic oligonucleotide
cgccuggcacggcuuagcg

SEQ ID NO: 1100 - RNA, 19 nt, Artificial Sequence
  Description of Artificial Sequence: Synthetic oligonucleotide
gccuggcacggcuuagcgc

SEQ ID NO: 1101 - RNA, 19 nt, Artificial Sequence
  Description of Artificial Sequence: Synthetic oligonucleotide
ccuggcacggcuuagcgcc

SEQ ID NO: 1102 - RNA, 19 nt, Artificial Sequence
  Description of Artificial Sequence: Synthetic oligonucleotide
cuggcacggcuuagcgcca

SEQ ID NO: 1103 - RNA, 19 nt, Artificial Sequence
  Description of Artificial Sequence: Synthetic oligonucleotide
uggcacggcuuagcgccac

SEQ ID NO: 1104 - RNA, 19 nt, Artificial Sequence
  Description of Artificial Sequence: Synthetic oligonucleotide
ggcacggcuuagcgccacu

SEQ ID NO: 1105 - RNA, 19 nt, Artificial Sequence
  Description of Artificial Sequence: Synthetic oligonucleotide
gcacggcuuagcgccacug

SEQ ID NO: 1106 - RNA, 19 nt, Artificial Sequence
  Description of Artificial Sequence: Synthetic oligonucleotide
cacggcuuagcgccacuga

SEQ ID NO: 1107 - RNA, 19 nt, Artificial Sequence
  Description of Artificial Sequence: Synthetic oligonucleotide
acggcuuagcgccacugag

SEQ ID NO: 1108 - RNA, 19 nt, Artificial Sequence
  Description of Artificial Sequence: Synthetic oligonucleotide
cggcuuagcgccacugagc

SEQ ID NO: 1109 - RNA, 19 nt, Artificial Sequence
  Description of Artificial Sequence: Synthetic oligonucleotide
ggcuuagcgccacugagcc

SEQ ID NO: 1110 - RNA, 19 nt, Artificial Sequence
  Description of Artificial Sequence: Synthetic oligonucleotide
gcuuagcgccacugagcca

SEQ ID NO: 1111 - RNA, 19 nt, Artificial Sequence
  Description of Artificial Sequence: Synthetic oligonucleotide
cuuagcgccacugagccag

SEQ ID NO: 1112 - RNA, 19 nt, Artificial Sequence
  Description of Artificial Sequence: Synthetic oligonucleotide
uuagcgccacugagccaga

SEQ ID NO: 1113 - RNA, 19 nt, Artificial Sequence
  Description of Artificial Sequence: Synthetic oligonucleotide
uagcgccacugagccagag

SEQ ID NO: 1114 - RNA, 19 nt, Artificial Sequence
  Description of Artificial Sequence: Synthetic oligonucleotide
agcgccacugagccagagu

SEQ ID NO: 1115 - RNA, 19 nt, Artificial Sequence
  Description of Artificial Sequence: Synthetic oligonucleotide
gcgccacugagccagaguu

SEQ ID NO: 1116 - RNA, 19 nt, Artificial Sequence
  Description of Artificial Sequence: Synthetic oligonucleotide
cgccacugagccagaguug

SEQ ID NO: 1117 - RNA, 19 nt, Artificial Sequence
  Description of Artificial Sequence: Synthetic oligonucleotide
gccacugagccagaguugg

SEQ ID NO: 1118 - RNA, 19 nt, Artificial Sequence
  Description of Artificial Sequence: Synthetic oligonucleotide
ccacugagccagaguuggg

SEQ ID NO: 1119 - RNA, 19 nt, Artificial Sequence
  Description of Artificial Sequence: Synthetic oligonucleotide
cacugagccagaguugggu

SEQ ID NO: 1120 - RNA, 19 nt, Artificial Sequence
  Description of Artificial Sequence: Synthetic oligonucleotide
acugagccagaguugggug

SEQ ID NO: 1121 - RNA, 19 nt, Artificial Sequence
  Description of Artificial Sequence: Synthetic oligonucleotide
cugagccagaguuggguga

SEQ ID NO: 1122 - RNA, 19 nt, Artificial Sequence
  Description of Artificial Sequence: Synthetic oligonucleotide
ugagccagaguugggugac

SEQ ID NO: 1123 - RNA, 19 nt, Artificial Sequence
  Description of Artificial Sequence: Synthetic oligonucleotide
gagccagaguugggugacu

SEQ ID NO: 1124 - RNA, 19 nt, Artificial Sequence
  Description of Artificial Sequence: Synthetic oligonucleotide
agccagaguugggugacua

SEQ ID NO: 1125 - RNA, 19 nt, Artificial Sequence
  Description of Artificial Sequence: Synthetic oligonucleotide
gccagaguugggugacuau

SEQ ID NO: 1126 - RNA, 19 nt, Artificial Sequence
  Description of Artificial Sequence: Synthetic oligonucleotide
ccagaguugggugacuauc

SEQ ID NO: 1127 - RNA, 19 nt, Artificial Sequence
  Description of Artificial Sequence: Synthetic oligonucleotide
cagaguugggugacuaucg

SEQ ID NO: 1128 - RNA, 19 nt, Artificial Sequence
  Description of Artificial Sequence: Synthetic oligonucleotide
agaguugggugacuaucgg

SEQ ID NO: 1129 - RNA, 19 nt, Artificial Sequence
  Description of Artificial Sequence: Synthetic oligonucleotide
gaguugggugacuaucggg

SEQ ID NO: 1130 - RNA, 19 nt, Artificial Sequence
  Description of Artificial Sequence: Synthetic oligonucleotide
aguugggugacuaucggga

SEQ ID NO: 1131 - RNA, 19 nt, Artificial Sequence
  Description of Artificial Sequence: Synthetic oligonucleotide
guugggugacuaucgggag

SEQ ID NO: 1132 - RNA, 19 nt, Artificial Sequence
  Description of Artificial Sequence: Synthetic oligonucleotide
uugggugacuaucgggagc

SEQ ID NO: 1133 - RNA, 19 nt, Artificial Sequence
  Description of Artificial Sequence: Synthetic oligonucleotide
ugggugacuaucgggagcu

SEQ ID NO: 1134 - RNA, 19 nt, Artificial Sequence
  Description of Artificial Sequence: Synthetic oligonucleotide
gggugacuaucgggagcug

SEQ ID NO: 1135 - RNA, 19 nt, Artificial Sequence
  Description of Artificial Sequence: Synthetic oligonucleotide
ggugacuaucgggagcugg

SEQ ID NO: 1136 - RNA, 19 nt, Artificial Sequence
  Description of Artificial Sequence: Synthetic oligonucleotide
gugacuaucgggagcuggu

SEQ ID NO: 1137 - RNA, 19 nt, Artificial Sequence
  Description of Artificial Sequence: Synthetic oligonucleotide
ugacuaucgggagcugguc

SEQ ID NO: 1138 - RNA, 19 nt, Artificial Sequence
  Description of Artificial Sequence: Synthetic oligonucleotide
gacuaucgggagcuggucc

SEQ ID NO: 1139 - RNA, 19 nt, Artificial Sequence
  Description of Artificial Sequence: Synthetic oligonucleotide
acuaucgggagcugguccu

SEQ ID NO: 1140 - RNA, 19 nt, Artificial Sequence
  Description of Artificial Sequence: Synthetic oligonucleotide
cuaucgggagcugguccuc

SEQ ID NO: 1141 - RNA, 19 nt, Artificial Sequence
  Description of Artificial Sequence: Synthetic oligonucleotide
uaucgggagcugguccucg

SEQ ID NO: 1142 - RNA, 19 nt, Artificial Sequence
  Description of Artificial Sequence: Synthetic oligonucleotide
aucgggagcugguccucga

SEQ ID NO: 1143 - RNA, 19 nt, Artificial Sequence
  Description of Artificial Sequence: Synthetic oligonucleotide
ucgggagcugguccucgac

SEQ ID NO: 1144 - RNA, 19 nt, Artificial Sequence
  Description of Artificial Sequence: Synthetic oligonucleotide
cgggagcugguccucgacu

SEQ ID NO: 1145 - RNA, 19 nt, Artificial Sequence
  Description of Artificial Sequence: Synthetic oligonucleotide
gggagcugguccucgacug

SEQ ID NO: 1146 - RNA, 19 nt, Artificial Sequence
  Description of Artificial Sequence: Synthetic oligonucleotide
ggagcugguccucgacugc

SEQ ID NO: 1147 - RNA, 19 nt, Artificial Sequence
  Description of Artificial Sequence: Synthetic oligonucleotide
gagcugguccucgacugca

SEQ ID NO: 1148 - RNA, 19 nt, Artificial Sequence
  Description of Artificial Sequence: Synthetic oligonucleotide
agcugguccucgacugcag

SEQ ID NO: 1149 - RNA, 19 nt, Artificial Sequence
  Description of Artificial Sequence: Synthetic oligonucleotide
gcugguccucgacugcaga

SEQ ID NO: 1150 - RNA, 19 nt, Artificial Sequence
  Description of Artificial Sequence: Synthetic oligonucleotide
cugguccucgacugcagau

SEQ ID NO: 1151 - RNA, 19 nt, Artificial Sequence
  Description of Artificial Sequence: Synthetic oligonucleotide
ugguccucgacugcagauu

SEQ ID NO: 1152 - RNA, 19 nt, Artificial Sequence
  Description of Artificial Sequence: Synthetic oligonucleotide
gguccucgacugcagauuu

SEQ ID NO: 1153 - RNA, 19 nt, Artificial Sequence
  Description of Artificial Sequence: Synthetic oligonucleotide
guccucgacugcagauuug

SEQ ID NO: 1154 - RNA, 19 nt, Artificial Sequence
  Description of Artificial Sequence: Synthetic oligonucleotide
uccucgacugcagauuugc

SEQ ID NO: 1155 - RNA, 19 nt, Artificial Sequence
  Description of Artificial Sequence: Synthetic oligonucleotide
ccucgacugcagauuugcu

SEQ ID NO: 1156 - RNA, 19 nt, Artificial Sequence
  Description of Artificial Sequence: Synthetic oligonucleotide
cucgacugcagauuugcuc

SEQ ID NO: 1157 - RNA, 19 nt, Artificial Sequence
  Description of Artificial Sequence: Synthetic oligonucleotide
ucgacugcagauuugcucc

SEQ ID NO: 1158 - RNA, 19 nt, Artificial Sequence
  Description of Artificial Sequence: Synthetic oligonucleotide
cgacugcagauuugcucca

SEQ ID NO: 1159 - RNA, 19 nt, Artificial Sequence
  Description of Artificial Sequence: Synthetic oligonucleotide
gacugcagauuugcuccaa

SEQ ID NO: 1160 - RNA, 19 nt, Artificial Sequence
  Description of Artificial Sequence: Synthetic oligonucleotide
acugcagauuugcuccaaa

SEQ ID NO: 1161 - RNA, 19 nt, Artificial Sequence
  Description of Artificial Sequence: Synthetic oligonucleotide
cugcagauuugcuccaaaa

SEQ ID NO: 1162 - RNA, 19 nt, Artificial Sequence
  Description of Artificial Sequence: Synthetic oligonucleotide
ugcagauuugcuccaaaac

SEQ ID NO: 1163 - RNA, 19 nt, Artificial Sequence
  Description of Artificial Sequence: Synthetic oligonucleotide
gcagauuugcuccaaaacg

SEQ ID NO: 1164 - RNA, 19 nt, Artificial Sequence
  Description of Artificial Sequence: Synthetic oligonucleotide
cagauuugcuccaaaacgc

SEQ ID NO: 1165 - RNA, 19 nt, Artificial Sequence
  Description of Artificial Sequence: Synthetic oligonucleotide
agauuugcuccaaaacgca

SEQ ID NO: 1166 - RNA, 19 nt, Artificial Sequence
  Description of Artificial Sequence: Synthetic oligonucleotide
gauuugcuccaaaacgcag

SEQ ID NO: 1167 - RNA, 19 nt, Artificial Sequence
  Description of Artificial Sequence: Synthetic oligonucleotide
auuugcuccaaaacgcagg

SEQ ID NO: 1168 - RNA, 19 nt, Artificial Sequence
  Description of Artificial Sequence: Synthetic oligonucleotide
uuugcuccaaaacgcaggc

SEQ ID NO: 1169 - RNA, 19 nt, Artificial Sequence
  Description of Artificial Sequence: Synthetic oligonucleotide
uugcuccaaaacgcaggcg

SEQ ID NO: 1170 - RNA, 19 nt, Artificial Sequence
  Description of Artificial Sequence: Synthetic oligonucleotide
ugcuccaaaacgcaggcgc

SEQ ID NO: 1171 - RNA, 19 nt, Artificial Sequence
  Description of Artificial Sequence: Synthetic oligonucleotide
gcuccaaaacgcaggcgcc

SEQ ID NO: 1172 - RNA, 19 nt, Artificial Sequence
  Description of Artificial Sequence: Synthetic oligonucleotide
cuccaaaacgcaggcgccg

SEQ ID NO: 1173 - RNA, 19 nt, Artificial Sequence
  Description of Artificial Sequence: Synthetic oligonucleotide
uccaaaacgcaggcgccgg

SEQ ID NO: 1174 - RNA, 19 nt, Artificial Sequence
  Description of Artificial Sequence: Synthetic oligonucleotide
ccaaaacgcaggcgccggg

SEQ ID NO: 1175 - RNA, 19 nt, Artificial Sequence
  Description of Artificial Sequence: Synthetic oligonucleotide
caaaacgcaggcgccgggg

SEQ ID NO: 1176 - RNA, 19 nt, Artificial Sequence
  Description of Artificial Sequence: Synthetic oligonucleotide
aaaacgcaggcgccggggg

SEQ ID NO: 1177 - RNA, 19 nt, Artificial Sequence
  Description of Artificial Sequence: Synthetic oligonucleotide
aaacgcaggcgccgggggg

SEQ ID NO: 1178 - RNA, 19 nt, Artificial Sequence
  Description of Artificial Sequence: Synthetic oligonucleotide
aacgcaggcgccggggggc

SEQ ID NO: 1179 - RNA, 19 nt, Artificial Sequence
  Description of Artificial Sequence: Synthetic oligonucleotide
acgcaggcgccggggggcc

SEQ ID NO: 1180 - RNA, 19 nt, Artificial Sequence
  Description of Artificial Sequence: Synthetic oligonucleotide
cgcaggcgccggggggccc

SEQ ID NO: 1181 - RNA, 19 nt, Artificial Sequence
  Description of Artificial Sequence: Synthetic oligonucleotide
gcaggcgccggggggcccc

SEQ ID NO: 1182 - RNA, 19 nt, Artificial Sequence
  Description of Artificial Sequence: Synthetic oligonucleotide
caggcgccggggggcccca

SEQ ID NO: 1183 - RNA, 19 nt, Artificial Sequence
  Description of Artificial Sequence: Synthetic oligonucleotide
aggcgccggggggccccag

SEQ ID NO: 1184 - RNA, 19 nt, Artificial Sequence
  Description of Artificial Sequence: Synthetic oligonucleotide
ggcgccggggggccccaga

SEQ ID NO: 1185 - RNA, 19 nt, Artificial Sequence
  Description of Artificial Sequence: Synthetic oligonucleotide
gcgccggggggccccagaa

SEQ ID NO: 1186 - RNA, 19 nt, Artificial Sequence
  Description of Artificial Sequence: Synthetic oligonucleotide
cgccggggggccccagaag

SEQ ID NO: 1187 - RNA, 19 nt, Artificial Sequence
  Description of Artificial Sequence: Synthetic oligonucleotide
gccggggggccccagaagg

SEQ ID NO: 1188 - RNA, 19 nt, Artificial Sequence
  Description of Artificial Sequence: Synthetic oligonucleotide
ccggggggccccagaaggc

SEQ ID NO: 1189 - RNA, 19 nt, Artificial Sequence
  Description of Artificial Sequence: Synthetic oligonucleotide
cggggggccccagaaggcg

SEQ ID NO: 1190 - RNA, 19 nt, Artificial Sequence
  Description of Artificial Sequence: Synthetic oligonucleotide
ggggggccccagaaggcgg

SEQ ID NO: 1191 - RNA, 19 nt, Artificial Sequence
  Description of Artificial Sequence: Synthetic oligonucleotide
gggggccccagaaggcgga

SEQ ID NO: 1192 - RNA, 19 nt, Artificial Sequence
  Description of Artificial Sequence: Synthetic oligonucleotide
ggggccccagaaggcggac

SEQ ID NO: 1193 - RNA, 19 nt, Artificial Sequence
  Description of Artificial Sequence: Synthetic oligonucleotide
gggccccagaaggcggaca

SEQ ID NO: 1194 - RNA, 19 nt, Artificial Sequence
  Description of Artificial Sequence: Synthetic oligonucleotide
ggccccagaaggcggacag

SEQ ID NO: 1195 - RNA, 19 nt, Artificial Sequence
  Description of Artificial Sequence: Synthetic oligonucleotide
gccccagaaggcggacagc

SEQ ID NO: 1196 - RNA, 19 nt, Artificial Sequence
  Description of Artificial Sequence: Synthetic oligonucleotide
ccccagaaggcggacagcc

SEQ ID NO: 1197 - RNA, 19 nt, Artificial Sequence
  Description of Artificial Sequence: Synthetic oligonucleotide
cccagaaggcggacagccc

SEQ ID NO: 1198 - RNA, 19 nt, Artificial Sequence
  Description of Artificial Sequence: Synthetic oligonucleotide
ccagaaggcggacagcccu

SEQ ID NO: 1199 - RNA, 19 nt, Artificial Sequence
  Description of Artificial Sequence: Synthetic oligonucleotide
cagaaggcggacagcccua

SEQ ID NO: 1200 - RNA, 19 nt, Artificial Sequence
  Description of Artificial Sequence: Synthetic oligonucleotide
agaaggcggacagcccuac

SEQ ID NO: 1201 - RNA, 19 nt, Artificial Sequence
  Description of Artificial Sequence: Synthetic oligonucleotide
gaaggcggacagcccuacc

SEQ ID NO: 1202 - RNA, 19 nt, Artificial Sequence
  Description of Artificial Sequence: Synthetic oligonucleotide
aaggcggacagcccuaccc

SEQ ID NO: 1203 - RNA, 19 nt, Artificial Sequence
  Description of Artificial Sequence: Synthetic oligonucleotide
aggcggacagcccuacccu

SEQ ID NO: 1204 - RNA, 19 nt, Artificial Sequence
  Description of Artificial Sequence: Synthetic oligonucleotide
ggcggacagcccuacccug

SEQ ID NO: 1205 - RNA, 19 nt, Artificial Sequence
  Description of Artificial Sequence: Synthetic oligonucleotide
gcggacagcccuacccugu

SEQ ID NO: 1206 - RNA, 19 nt, Artificial Sequence
  Description of Artificial Sequence: Synthetic oligonucleotide
cggacagcccuacccugug

SEQ ID NO: 1207 - RNA, 19 nt, Artificial Sequence
  Description of Artificial Sequence: Synthetic oligonucleotide
ggacagcccuacccugugc

SEQ ID NO: 1208 - RNA, 19 nt, Artificial Sequence
  Description of Artificial Sequence: Synthetic oligonucleotide
gacagcccuacccugugcu

SEQ ID NO: 1209 - RNA, 19 nt, Artificial Sequence
  Description of Artificial Sequence: Synthetic oligonucleotide
acagcccuacccugugcug

SEQ ID NO: 1210 - RNA, 19 nt, Artificial Sequence
  Description of Artificial Sequence: Synthetic oligonucleotide
cagcccuacccugugcugc

SEQ ID NO: 1211 - RNA, 19 nt, Artificial Sequence
  Description of Artificial Sequence: Synthetic oligonucleotide
agcccuacccugugcugcg

SEQ ID NO: 1212 - RNA, 19 nt, Artificial Sequence
  Description of Artificial Sequence: Synthetic oligonucleotide
gcccuacccugugcugcgg

SEQ ID NO: 1213 - RNA, 19 nt, Artificial Sequence
  Description of Artificial Sequence: Synthetic oligonucleotide
cccuacccugugcugcggg

SEQ ID NO: 1214 - RNA, 19 nt, Artificial Sequence
  Description of Artificial Sequence: Synthetic oligonucleotide
ccuacccugugcugcgggu

SEQ ID NO: 1215 - RNA, 19 nt, Artificial Sequence
  Description of Artificial Sequence: Synthetic oligonucleotide
cuacccugugcugcgggug

SEQ ID NO: 1216 - RNA, 19 nt, Artificial Sequence
  Description of Artificial Sequence: Synthetic oligonucleotide
uacccugugcugcgggugg

SEQ ID NO: 1217 - RNA, 19 nt, Artificial Sequence
  Description of Artificial Sequence: Synthetic oligonucleotide
acccugugcugcggguggc

SEQ ID NO: 1218 - RNA, 19 nt, Artificial Sequence
  Description of Artificial Sequence: Synthetic oligonucleotide
cccugugcugcggguggcc

SEQ ID NO: 1219 - RNA, 19 nt, Artificial Sequence
  Description of Artificial Sequence: Synthetic oligonucleotide
ccugugcugcggguggccc

SEQ ID NO: 1220 - RNA, 19 nt, Artificial Sequence
  Description of Artificial Sequence: Synthetic oligonucleotide
cugugcugcggguggccca

SEQ ID NO: 1221 - RNA, 19 nt, Artificial Sequence
  Description of Artificial Sequence: Synthetic oligonucleotide
ugugcugcggguggcccac

SEQ ID NO: 1222 - RNA, 19 nt, Artificial Sequence
  Description of Artificial Sequence: Synthetic oligonucleotide
gugcugcggguggcccacu

SEQ ID NO: 1223 - RNA, 19 nt, Artificial Sequence
  Description of Artificial Sequence: Synthetic oligonucleotide
ugcugcggguggcccacuc

SEQ ID NO: 1224 - RNA, 19 nt, Artificial Sequence
  Description of Artificial Sequence: Synthetic oligonucleotide
gcugcggguggcccacucc

SEQ ID NO: 1225 - RNA, 19 nt, Artificial Sequence
  Description of Artificial Sequence: Synthetic oligonucleotide
cugcggguggcccacuccg

SEQ ID NO: 1226 - RNA, 19 nt, Artificial Sequence
  Description of Artificial Sequence: Synthetic oligonucleotide
ugcggguggcccacuccgc

SEQ ID NO: 1227 - RNA, 19 nt, Artificial Sequence
  Description of Artificial Sequence: Synthetic oligonucleotide
gcggguggcccacuccgcu

SEQ ID NO: 1228 - RNA, 19 nt, Artificial Sequence
  Description of Artificial Sequence: Synthetic oligonucleotide
cggguggcccacuccgcuc

SEQ ID NO: 1229 - RNA, 19 nt, Artificial Sequence
  Description of Artificial Sequence: Synthetic oligonucleotide
ggguggcccacuccgcucc

SEQ ID NO: 1230 - RNA, 19 nt, Artificial Sequence
  Description of Artificial Sequence: Synthetic oligonucleotide
gguggcccacuccgcucca

SEQ ID NO: 1231 - RNA, 19 nt, Artificial Sequence
  Description of Artificial Sequence: Synthetic oligonucleotide
guggcccacuccgcuccag

SEQ ID NO: 1232 - RNA, 19 nt, Artificial Sequence
  Description of Artificial Sequence: Synthetic oligonucleotide
uggcccacuccgcuccagu

SEQ ID NO: 1233 - RNA, 19 nt, Artificial Sequence
  Description of Artificial Sequence: Synthetic oligonucleotide
ggcccacuccgcuccagug

SEQ ID NO: 1234 - RNA, 19 nt, Artificial Sequence
  Description of Artificial Sequence: Synthetic oligonucleotide
gcccacuccgcuccagugg

SEQ ID NO: 1235 - RNA, 19 nt, Artificial Sequence
  Description of Artificial Sequence: Synthetic oligonucleotide
cccacuccgcuccaguggg

SEQ ID NO: 1236 - RNA, 19 nt, Artificial Sequence
  Description of Artificial Sequence: Synthetic oligonucleotide
ccacuccgcuccagugggu

SEQ ID NO: 1237 - RNA, 19 nt, Artificial Sequence
  Description of Artificial Sequence: Synthetic oligonucleotide
cacuccgcuccagugggug

SEQ ID NO: 1238 - RNA, 19 nt, Artificial Sequence
  Description of Artificial Sequence: Synthetic oligonucleotide
acuccgcuccagugggugc

SEQ ID NO: 1239 - RNA, 19 nt, Artificial Sequence
  Description of Artificial Sequence: Synthetic oligonucleotide
cuccgcuccagugggugcc

SEQ ID NO: 1240 - RNA, 19 nt, Artificial Sequence
  Description of Artificial Sequence: Synthetic oligonucleotide
uccgcuccagugggugccc

SEQ ID NO: 1241 - RNA, 19 nt, Artificial Sequence
  Description of Artificial Sequence: Synthetic oligonucleotide
ccgcuccagugggugccca

SEQ ID NO: 1242 - RNA, 19 nt, Artificial Sequence
  Description of Artificial Sequence: Synthetic oligonucleotide
cgcuccagugggugcccaa

SEQ ID NO: 1243 - RNA, 19 nt, Artificial Sequence
  Description of Artificial Sequence: Synthetic oligonucleotide
gcuccagugggugcccaac

SEQ ID NO: 1244 - RNA, 19 nt, Artificial Sequence
  Description of Artificial Sequence: Synthetic oligonucleotide
cuccagugggugcccaacu

SEQ ID NO: 1245 - RNA, 19 nt, Artificial Sequence
  Description of Artificial Sequence: Synthetic oligonucleotide
uccagugggugcccaacuu

SEQ ID NO: 1246 - RNA, 19 nt, Artificial Sequence
  Description of Artificial Sequence: Synthetic oligonucleotide
ccagugggugcccaacuug

SEQ ID NO: 1247 - RNA, 19 nt, Artificial Sequence
  Description of Artificial Sequence: Synthetic oligonucleotide
cagugggugcccaacuugc

SEQ ID NO: 1248 - RNA, 19 nt, Artificial Sequence
  Description of Artificial Sequence: Synthetic oligonucleotide
agugggugcccaacuugcc

SEQ ID NO: 1249 - RNA, 19 nt, Artificial Sequence
  Description of Artificial Sequence: Synthetic oligonucleotide
gugggugcccaacuugcca

SEQ ID NO: 1250 - RNA, 19 nt, Artificial Sequence
  Description of Artificial Sequence: Synthetic oligonucleotide
ugggugcccaacuugccac

SEQ ID NO: 1251 - RNA, 19 nt, Artificial Sequence
  Description of Artificial Sequence: Synthetic oligonucleotide
gggugcccaacuugccacu

SEQ ID NO: 1252 - RNA, 19 nt, Artificial Sequence
  Description of Artificial Sequence: Synthetic oligonucleotide
ggugcccaacuugccacug

SEQ ID NO: 1253 - RNA, 19 nt, Artificial Sequence
  Description of Artificial Sequence: Synthetic oligonucleotide
gugcccaacuugccacuga

SEQ ID NO: 1254 - RNA, 19 nt, Artificial Sequence
  Description of Artificial Sequence: Synthetic oligonucleotide
ugcccaacuugccacugag

SEQ ID NO: 1255 - RNA, 19 nt, Artificial Sequence
  Description of Artificial Sequence: Synthetic oligonucleotide
gcccaacuugccacugagc

SEQ ID NO: 1256 - RNA, 19 nt, Artificial Sequence
  Description of Artificial Sequence: Synthetic oligonucleotide
cccaacuugccacugagcu

SEQ ID NO: 1257 - RNA, 19 nt, Artificial Sequence
  Description of Artificial Sequence: Synthetic oligonucleotide
ccaacuugccacugagcug

SEQ ID NO: 1258 - RNA, 19 nt, Artificial Sequence
  Description of Artificial Sequence: Synthetic oligonucleotide
caacuugccacugagcuga

SEQ ID NO: 1259 - RNA, 19 nt, Artificial Sequence
  Description of Artificial Sequence: Synthetic oligonucleotide
aacuugccacugagcugag

SEQ ID NO: 1260 - RNA, 19 nt, Artificial Sequence
  Description of Artificial Sequence: Synthetic oligonucleotide
acuugccacugagcugagc

SEQ ID NO: 1261 - RNA, 19 nt, Artificial Sequence
  Description of Artificial Sequence: Synthetic oligonucleotide
cuugccacugagcugagca

SEQ ID NO: 1262 - RNA, 19 nt, Artificial Sequence
  Description of Artificial Sequence: Synthetic oligonucleotide
uugccacugagcugagcau

SEQ ID NO: 1263 - RNA, 19 nt, Artificial Sequence
  Description of Artificial Sequence: Synthetic oligonucleotide
ugccacugagcugagcauc

SEQ ID NO: 1264 - RNA, 19 nt, Artificial Sequence
  Description of Artificial Sequence: Synthetic oligonucleotide
gccacugagcugagcaucg

SEQ ID NO: 1265 - RNA, 19 nt, Artificial Sequence
  Description of Artificial Sequence: Synthetic oligonucleotide
ccacugagcugagcaucgc

SEQ ID NO: 1266 - RNA, 19 nt, Artificial Sequence
  Description of Artificial Sequence: Synthetic oligonucleotide
cacugagcugagcaucgcc

SEQ ID NO: 1267 - RNA, 19 nt, Artificial Sequence
  Description of Artificial Sequence: Synthetic oligonucleotide
acugagcugagcaucgccg

SEQ ID NO: 1268 - RNA, 19 nt, Artificial Sequence
  Description of Artificial Sequence: Synthetic oligonucleotide
cugagcugagcaucgccga

SEQ ID NO: 1269 - RNA, 19 nt, Artificial Sequence
  Description of Artificial Sequence: Synthetic oligonucleotide
ugagcugagcaucgccgag

SEQ ID NO: 1270 - RNA, 19 nt, Artificial Sequence
  Description of Artificial Sequence: Synthetic oligonucleotide
gagcugagcaucgccgagg

SEQ ID NO: 1271 - RNA, 19 nt, Artificial Sequence
  Description of Artificial Sequence: Synthetic oligonucleotide
agcugagcaucgccgaggg

SEQ ID NO: 1272 - RNA, 19 nt, Artificial Sequence
  Description of Artificial Sequence: Synthetic oligonucleotide
gcugagcaucgccgagggc

SEQ ID NO: 1273 - RNA, 19 nt, Artificial Sequence
  Description of Artificial Sequence: Synthetic oligonucleotide
cugagcaucgccgagggcc

SEQ ID NO: 1274 - RNA, 19 nt, Artificial Sequence
  Description of Artificial Sequence: Synthetic oligonucleotide
ugagcaucgccgagggcca

SEQ ID NO: 1275 - RNA, 19 nt, Artificial Sequence
  Description of Artificial Sequence: Synthetic oligonucleotide
gagcaucgccgagggccag

SEQ ID NO: 1276 - RNA, 19 nt, Artificial Sequence
  Description of Artificial Sequence: Synthetic oligonucleotide
agcaucgccgagggccagg

SEQ ID NO: 1277 - RNA, 19 nt, Artificial Sequence
  Description of Artificial Sequence: Synthetic oligonucleotide
gcaucgccgagggccagga

SEQ ID NO: 1278 - RNA, 19 nt, Artificial Sequence
  Description of Artificial Sequence: Synthetic oligonucleotide
caucgccgagggccaggaa

SEQ ID NO: 1279 - RNA, 19 nt, Artificial Sequence
  Description of Artificial Sequence: Synthetic oligonucleotide
aucgccgagggccaggaag

SEQ ID NO: 1280 - RNA, 19 nt, Artificial Sequence
  Description of Artificial Sequence: Synthetic oligonucleotide
ucgccgagggccaggaagu

SEQ ID NO: 1281 - RNA, 19 nt, Artificial Sequence
  Description of Artificial Sequence: Synthetic oligonucleotide
cgccgagggccaggaagua

SEQ ID NO: 1282 - RNA, 19 nt, Artificial Sequence
  Description of Artificial Sequence: Synthetic oligonucleotide
gccgagggccaggaaguac

SEQ ID NO: 1283 - RNA, 19 nt, Artificial Sequence
  Description of Artificial Sequence: Synthetic oligonucleotide
ccgagggccaggaaguacu

SEQ ID NO: 1284 - RNA, 19 nt, Artificial Sequence
  Description of Artificial Sequence: Synthetic oligonucleotide
cgagggccaggaaguacua

SEQ ID NO: 1285 - RNA, 19 nt, Artificial Sequence
  Description of Artificial Sequence: Synthetic oligonucleotide
gagggccaggaaguacuau

SEQ ID NO: 1286 - RNA, 19 nt, Artificial Sequence
  Description of Artificial Sequence: Synthetic oligonucleotide
agggccaggaaguacuauu

SEQ ID NO: 1287 - RNA, 19 nt, Artificial Sequence
  Description of Artificial Sequence: Synthetic oligonucleotide
gggccaggaaguacuauuu

SEQ ID NO: 1288 - RNA, 19 nt, Artificial Sequence
  Description of Artificial Sequence: Synthetic oligonucleotide
ggccaggaaguacuauuug

SEQ ID NO: 1289 - RNA, 19 nt, Artificial Sequence
  Description of Artificial Sequence: Synthetic oligonucleotide
gccaggaaguacuauuugg

SEQ ID NO: 1290 - RNA, 19 nt, Artificial Sequence
  Description of Artificial Sequence: Synthetic oligonucleotide
ccaggaaguacuauuuggg

SEQ ID NO: 1291 - RNA, 19 nt, Artificial Sequence
  Description of Artificial Sequence: Synthetic oligonucleotide
caggaaguacuauuugggg

SEQ ID NO: 1292 - RNA, 19 nt, Artificial Sequence
  Description of Artificial Sequence: Synthetic oligonucleotide
aggaaguacuauuuggggu

SEQ ID NO: 1293 - RNA, 19 nt, Artificial Sequence
  Description of Artificial Sequence: Synthetic oligonucleotide
ggaaguacuauuugggguc

SEQ ID NO: 1294 - RNA, 19 nt, Artificial Sequence
  Description of Artificial Sequence: Synthetic oligonucleotide
gaaguacuauuuggggucu

SEQ ID NO: 1295 - RNA, 19 nt, Artificial Sequence
  Description of Artificial Sequence: Synthetic oligonucleotide
aaguacuauuuggggucuu

SEQ ID NO: 1296 - RNA, 19 nt, Artificial Sequence
  Description of Artificial Sequence: Synthetic oligonucleotide
aguacuauuuggggucuuu

SEQ ID NO: 1297 - RNA, 19 nt, Artificial Sequence
  Description of Artificial Sequence: Synthetic oligonucleotide
guacuauuuggggucuuug

SEQ ID NO: 1298 - RNA, 19 nt, Artificial Sequence
  Description of Artificial Sequence: Synthetic oligonucleotide
uacuauuuggggucuuugu

SEQ ID NO: 1299 - RNA, 19 nt, Artificial Sequence
  Description of Artificial Sequence: Synthetic oligonucleotide
acuauuuggggucuuugug

SEQ ID NO: 1300 - RNA, 19 nt, Artificial Sequence
  Description of Artificial Sequence: Synthetic oligonucleotide
cuauuuggggucuuuguga

SEQ ID NO: 1301 - RNA, 19 nt, Artificial Sequence
  Description of Artificial Sequence: Synthetic oligonucleotide
uauuuggggucuuugugac

SEQ ID NO: 1302 - RNA, 19 nt, Artificial Sequence
  Description of Artificial Sequence: Synthetic oligonucleotide
auuuggggucuuugugacu

SEQ ID NO: 1303 - RNA, 19 nt, Artificial Sequence
  Description of Artificial Sequence: Synthetic oligonucleotide
uuuggggucuuugugacug

SEQ ID NO: 1304 - RNA, 19 nt, Artificial Sequence
  Description of Artificial Sequence: Synthetic oligonucleotide
uuggggucuuugugacugg

SEQ ID NO: 1305 - RNA, 19 nt, Artificial Sequence
  Description of Artificial Sequence: Synthetic oligonucleotide
uggggucuuugugacuggc

SEQ ID NO: 1306 - RNA, 19 nt, Artificial Sequence
  Description of Artificial Sequence: Synthetic oligonucleotide
ggggucuuugugacuggca

SEQ ID NO: 1307 - RNA, 19 nt, Artificial Sequence
  Description of Artificial Sequence: Synthetic oligonucleotide
gggucuuugugacuggcaa

SEQ ID NO: 1308 - RNA, 19 nt, Artificial Sequence
  Description of Artificial Sequence: Synthetic oligonucleotide
ggucuuugugacuggcaag

SEQ ID NO: 1309 - RNA, 19 nt, Artificial Sequence
  Description of Artificial Sequence: Synthetic oligonucleotide
gucuuugugacuggcaagg

SEQ ID NO: 1310 - RNA, 19 nt, Artificial Sequence
  Description of Artificial Sequence: Synthetic oligonucleotide
ucuuugugacuggcaagga

SEQ ID NO: 1311 - RNA, 19 nt, Artificial Sequence
  Description of Artificial Sequence: Synthetic oligonucleotide
cuuugugacuggcaaggau

SEQ ID NO: 1312 - RNA, 19 nt, Artificial Sequence
  Description of Artificial Sequence: Synthetic oligonucleotide
uuugugacuggcaaggaug

SEQ ID NO: 1313 - RNA, 19 nt, Artificial Sequence
  Description of Artificial Sequence: Synthetic oligonucleotide
uugugacuggcaaggaugg

SEQ ID NO: 1314 - RNA, 19 nt, Artificial Sequence
  Description of Artificial Sequence: Synthetic oligonucleotide
ugugacuggcaaggauggu

SEQ ID NO: 1315 - RNA, 19 nt, Artificial Sequence
  Description of Artificial Sequence: Synthetic oligonucleotide
gugacuggcaaggauggug

SEQ ID NO: 1316 - RNA, 19 nt, Artificial Sequence
  Description of Artificial Sequence: Synthetic oligonucleotide
ugacuggcaaggauggugg

SEQ ID NO: 1317 - RNA, 19 nt, Artificial Sequence
  Description of Artificial Sequence: Synthetic oligonucleotide
gacuggcaaggaugguggu

SEQ ID NO: 1318 - RNA, 19 nt, Artificial Sequence
  Description of Artificial Sequence: Synthetic oligonucleotide
acuggcaaggauggugguc

SEQ ID NO: 1319 - RNA, 19 nt, Artificial Sequence
  Description of Artificial Sequence: Synthetic oligonucleotide
cuggcaaggaugguggucc

SEQ ID NO: 1320 - RNA, 19 nt, Artificial Sequence
  Description of Artificial Sequence: Synthetic oligonucleotide
uggcaaggauggugguccu

SEQ ID NO: 1321 - RNA, 19 nt, Artificial Sequence
  Description of Artificial Sequence: Synthetic oligonucleotide
ggcaaggauggugguccug

SEQ ID NO: 1322 - RNA, 19 nt, Artificial Sequence
  Description of Artificial Sequence: Synthetic oligonucleotide
gcaaggauggugguccugg

SEQ ID NO: 1323 - RNA, 19 nt, Artificial Sequence
  Description of Artificial Sequence: Synthetic oligonucleotide
caaggauggugguccuggc

SEQ ID NO: 1324 - RNA, 19 nt, Artificial Sequence
  Description of Artificial Sequence: Synthetic oligonucleotide
aaggauggugguccuggcg

SEQ ID NO: 1325 - RNA, 19 nt, Artificial Sequence
  Description of Artificial Sequence: Synthetic oligonucleotide
aggauggugguccuggcgu

SEQ ID NO: 1326 - RNA, 19 nt, Artificial Sequence
  Description of Artificial Sequence: Synthetic oligonucleotide
ggauggugguccuggcgug

SEQ ID NO: 1327 - RNA, 19 nt, Artificial Sequence
  Description of Artificial Sequence: Synthetic oligonucleotide
gauggugguccuggcgugg

SEQ ID NO: 1328 - RNA, 19 nt, Artificial Sequence
  Description of Artificial Sequence: Synthetic oligonucleotide
auggugguccuggcguggg

SEQ ID NO: 1329 - RNA, 19 nt, Artificial Sequence
  Description of Artificial Sequence: Synthetic oligonucleotide
uggugguccuggcgugggc

SEQ ID NO: 1330 - RNA, 19 nt, Artificial Sequence
  Description of Artificial Sequence: Synthetic oligonucleotide
ggugguccuggcgugggcc

SEQ ID NO: 1331 - RNA, 19 nt, Artificial Sequence
  Description of Artificial Sequence: Synthetic oligonucleotide
gugguccuggcgugggccc

SEQ ID NO: 1332 - RNA, 19 nt, Artificial Sequence
  Description of Artificial Sequence: Synthetic oligonucleotide
ugguccuggcgugggcccc

SEQ ID NO: 1333 - RNA, 19 nt, Artificial Sequence
  Description of Artificial Sequence: Synthetic oligonucleotide
gguccuggcgugggcccca

SEQ ID NO: 1334 - RNA, 19 nt, Artificial Sequence
  Description of Artificial Sequence: Synthetic oligonucleotide
guccuggcgugggccccaa

SEQ ID NO: 1335 - RNA, 19 nt, Artificial Sequence
  Description of Artificial Sequence: Synthetic oligonucleotide
uccuggcgugggccccaac

SEQ ID NO: 1336 - RNA, 19 nt, Artificial Sequence
  Description of Artificial Sequence: Synthetic oligonucleotide
ccuggcgugggccccaacu

SEQ ID NO: 1337 - RNA, 19 nt, Artificial Sequence
  Description of Artificial Sequence: Synthetic oligonucleotide
cuggcgugggccccaacuc

SEQ ID NO: 1338 - RNA, 19 nt, Artificial Sequence
  Description of Artificial Sequence: Synthetic oligonucleotide
uggcgugggccccaacucu

SEQ ID NO: 1339 - RNA, 19 nt, Artificial Sequence
  Description of Artificial Sequence: Synthetic oligonucleotide
ggcgugggccccaacucug

SEQ ID NO: 1340 - RNA, 19 nt, Artificial Sequence
  Description of Artificial Sequence: Synthetic oligonucleotide
gcgugggccccaacucugu

SEQ ID NO: 1341 - RNA, 19 nt, Artificial Sequence
  Description of Artificial Sequence: Synthetic oligonucleotide
cgugggccccaacucuguc

SEQ ID NO: 1342 - RNA, 19 nt, Artificial Sequence
  Description of Artificial Sequence: Synthetic oligonucleotide
gugggccccaacucugucg

SEQ ID NO: 1343 - RNA, 19 nt, Artificial Sequence
  Description of Artificial Sequence: Synthetic oligonucleotide
ugggccccaacucugucgu

SEQ ID NO: 1344 - RNA, 19 nt, Artificial Sequence
  Description of Artificial Sequence: Synthetic oligonucleotide
gggccccaacucugucguc

SEQ ID NO: 1345 - RNA, 19 nt, Artificial Sequence
  Description of Artificial Sequence: Synthetic oligonucleotide
ggccccaacucugucgucu

SEQ ID NO: 1346 - RNA, 19 nt, Artificial Sequence
  Description of Artificial Sequence: Synthetic oligonucleotide
gccccaacucugucgucug

SEQ ID NO: 1347 - RNA, 19 nt, Artificial Sequence
  Description of Artificial Sequence: Synthetic oligonucleotide
ccccaacucugucgucugu

SEQ ID NO: 1348 - RNA, 19 nt, Artificial Sequence
  Description of Artificial Sequence: Synthetic oligonucleotide
cccaacucugucgucugug

SEQ ID NO: 1349 - RNA, 19 nt, Artificial Sequence
  Description of Artificial Sequence: Synthetic oligonucleotide
ccaacucugucgucugugc

SEQ ID NO: 1350 - RNA, 19 nt, Artificial Sequence
  Description of Artificial Sequence: Synthetic oligonucleotide
caacucugucgucugugcc

SEQ ID NO: 1351 - RNA, 19 nt, Artificial Sequence
  Description of Artificial Sequence: Synthetic oligonucleotide
aacucugucgucugugccu

SEQ ID NO: 1352 - RNA, 19 nt, Artificial Sequence
  Description of Artificial Sequence: Synthetic oligonucleotide
acucugucgucugugccuu

SEQ ID NO: 1353 - RNA, 19 nt, Artificial Sequence
  Description of Artificial Sequence: Synthetic oligonucleotide
cucugucgucugugccuuc

SEQ ID NO: 1354 - RNA, 19 nt, Artificial Sequence
  Description of Artificial Sequence: Synthetic oligonucleotide
ucugucgucugugccuucc

SEQ ID NO: 1355 - RNA, 19 nt, Artificial Sequence
  Description of Artificial Sequence: Synthetic oligonucleotide
cugucgucugugccuuccc

SEQ ID NO: 1356 - RNA, 19 nt, Artificial Sequence
  Description of Artificial Sequence: Synthetic oligonucleotide
ugucgucugugccuucccc

SEQ ID NO: 1357 - RNA, 19 nt, Artificial Sequence
  Description of Artificial Sequence: Synthetic oligonucleotide
gucgucugugccuucccca

SEQ ID NO: 1358 - RNA, 19 nt, Artificial Sequence
  Description of Artificial Sequence: Synthetic oligonucleotide
ucgucugugccuuccccau

SEQ ID NO: 1359 - RNA, 19 nt, Artificial Sequence
  Description of Artificial Sequence: Synthetic oligonucleotide
cgucugugccuuccccauu

SEQ ID NO: 1360 - RNA, 19 nt, Artificial Sequence
  Description of Artificial Sequence: Synthetic oligonucleotide
gucugugccuuccccauug

SEQ ID NO: 1361 - RNA, 19 nt, Artificial Sequence
  Description of Artificial Sequence: Synthetic oligonucleotide
ucugugccuuccccauuga

SEQ ID NO: 1362 - RNA, 19 nt, Artificial Sequence
  Description of Artificial Sequence: Synthetic oligonucleotide
cugugccuuccccauugac

SEQ ID NO: 1363 - RNA, 19 nt, Artificial Sequence
  Description of Artificial Sequence: Synthetic oligonucleotide
ugugccuuccccauugacc

SEQ ID NO: 1364 - RNA, 19 nt, Artificial Sequence
  Description of Artificial Sequence: Synthetic oligonucleotide
gugccuuccccauugaccu

SEQ ID NO: 1365 - RNA, 19 nt, Artificial Sequence
  Description of Artificial Sequence: Synthetic oligonucleotide
ugccuuccccauugaccug

SEQ ID NO: 1366 - RNA, 19 nt, Artificial Sequence
  Description of Artificial Sequence: Synthetic oligonucleotide
gccuuccccauugaccugc

SEQ ID NO: 1367 - RNA, 19 nt, Artificial Sequence
  Description of Artificial Sequence: Synthetic oligonucleotide
ccuuccccauugaccugcu

SEQ ID NO: 1368 - RNA, 19 nt, Artificial Sequence
  Description of Artificial Sequence: Synthetic oligonucleotide
cuuccccauugaccugcug

SEQ ID NO: 1369 - RNA, 19 nt, Artificial Sequence
  Description of Artificial Sequence: Synthetic oligonucleotide
uuccccauugaccugcugg

SEQ ID NO: 1370 - RNA, 19 nt, Artificial Sequence
  Description of Artificial Sequence: Synthetic oligonucleotide
uccccauugaccugcugga

SEQ ID NO: 1371 - RNA, 19 nt, Artificial Sequence
  Description of Artificial Sequence: Synthetic oligonucleotide
ccccauugaccugcuggac

SEQ ID NO: 1372 - RNA, 19 nt, Artificial Sequence
  Description of Artificial Sequence: Synthetic oligonucleotide
cccauugaccugcuggaca

SEQ ID NO: 1373 - RNA, 19 nt, Artificial Sequence
  Description of Artificial Sequence: Synthetic oligonucleotide
ccauugaccugcuggacac

SEQ ID NO: 1374 - RNA, 19 nt, Artificial Sequence
  Description of Artificial Sequence: Synthetic oligonucleotide
cauugaccugcuggacaca

SEQ ID NO: 1375 - RNA, 19 nt, Artificial Sequence
  Description of Artificial Sequence: Synthetic oligonucleotide
auugaccugcuggacacac

SEQ ID NO: 1376 - RNA, 19 nt, Artificial Sequence
  Description of Artificial Sequence: Synthetic oligonucleotide
uugaccugcuggacacacu

SEQ ID NO: 1377 - RNA, 19 nt, Artificial Sequence
  Description of Artificial Sequence: Synthetic oligonucleotide
ugaccugcuggacacacua

SEQ ID NO: 1378 - RNA, 19 nt, Artificial Sequence
  Description of Artificial Sequence: Synthetic oligonucleotide
gaccugcuggacacacuaa

SEQ ID NO: 1379 - RNA, 19 nt, Artificial Sequence
  Description of Artificial Sequence: Synthetic oligonucleotide
accugcuggacacacuaau

SEQ ID NO: 1380 - RNA, 19 nt, Artificial Sequence
  Description of Artificial Sequence: Synthetic oligonucleotide
ccugcuggacacacuaauu

SEQ ID NO: 1381 - RNA, 19 nt, Artificial Sequence
  Description of Artificial Sequence: Synthetic oligonucleotide
cugcuggacacacuaauug

SEQ ID NO: 1382 - RNA, 19 nt, Artificial Sequence
  Description of Artificial Sequence: Synthetic oligonucleotide
ugcuggacacacuaauuga

SEQ ID NO: 1383 - RNA, 19 nt, Artificial Sequence
  Description of Artificial Sequence: Synthetic oligonucleotide
gcuggacacacuaauugau

SEQ ID NO: 1384 - RNA, 19 nt, Artificial Sequence
  Description of Artificial Sequence: Synthetic oligonucleotide
cuggacacacuaauugaug

SEQ ID NO: 1385 - RNA, 19 nt, Artificial Sequence
  Description of Artificial Sequence: Synthetic oligonucleotide
uggacacacuaauugauga

SEQ ID NO: 1386 - RNA, 19 nt, Artificial Sequence
  Description of Artificial Sequence: Synthetic oligonucleotide
ggacacacuaauugaugag

SEQ ID NO: 1387 - RNA, 19 nt, Artificial Sequence
  Description of Artificial Sequence: Synthetic oligonucleotide
gacacacuaauugaugagg

SEQ ID NO: 1388 - RNA, 19 nt, Artificial Sequence
  Description of Artificial Sequence: Synthetic oligonucleotide
acacacuaauugaugaggg

SEQ ID NO: 1389 - RNA, 19 nt, Artificial Sequence
  Description of Artificial Sequence: Synthetic oligonucleotide
cacacuaauugaugagggu

SEQ ID NO: 1390 - RNA, 19 nt, Artificial Sequence
  Description of Artificial Sequence: Synthetic oligonucleotide
acacuaauugaugagggug

SEQ ID NO: 1391 - RNA, 19 nt, Artificial Sequence
  Description of Artificial Sequence: Synthetic oligonucleotide
cacuaauugaugagggugu

SEQ ID NO: 1392 - RNA, 19 nt, Artificial Sequence
  Description of Artificial Sequence: Synthetic oligonucleotide
acuaauugaugagggugug

SEQ ID NO: 1393 - RNA, 19 nt, Artificial Sequence
  Description of Artificial Sequence: Synthetic oligonucleotide
cuaauugaugagggugugg

SEQ ID NO: 1394 - RNA, 19 nt, Artificial Sequence
  Description of Artificial Sequence: Synthetic oligonucleotide
uaauugaugagggugugga

SEQ ID NO: 1395 - RNA, 19 nt, Artificial Sequence
  Description of Artificial Sequence: Synthetic oligonucleotide
aauugaugaggguguggag

SEQ ID NO: 1396 - RNA, 19 nt, Artificial Sequence
  Description of Artificial Sequence: Synthetic oligonucleotide
auugaugaggguguggagc

SEQ ID NO: 1397 - RNA, 19 nt, Artificial Sequence
  Description of Artificial Sequence: Synthetic oligonucleotide
uugaugaggguguggagcg

SEQ ID NO: 1398 - RNA, 19 nt, Artificial Sequence
  Description of Artificial Sequence: Synthetic oligonucleotide
ugaugaggguguggagcgc

SEQ ID NO: 1399 - RNA, 19 nt, Artificial Sequence
  Description of Artificial Sequence: Synthetic oligonucleotide
gaugaggguguggagcgcu

SEQ ID NO: 1400 - RNA, 19 nt, Artificial Sequence
  Description of Artificial Sequence: Synthetic oligonucleotide
augaggguguggagcgcug

SEQ ID NO: 1401 - RNA, 19 nt, Artificial Sequence
  Description of Artificial Sequence: Synthetic oligonucleotide
ugaggguguggagcgcugu

SEQ ID NO: 1402 - RNA, 19 nt, Artificial Sequence
  Description of Artificial Sequence: Synthetic oligonucleotide
gaggguguggagcgcuguu

SEQ ID NO: 1403 - RNA, 19 nt, Artificial Sequence
  Description of Artificial Sequence: Synthetic oligonucleotide
aggguguggagcgcuguug

SEQ ID NO: 1404 - RNA, 19 nt, Artificial Sequence
  Description of Artificial Sequence: Synthetic oligonucleotide
ggguguggagcgcuguugu

SEQ ID NO: 1405 - RNA, 19 nt, Artificial Sequence
  Description of Artificial Sequence: Synthetic oligonucleotide
gguguggagcgcuguugug

SEQ ID NO: 1406 - RNA, 19 nt, Artificial Sequence
  Description of Artificial Sequence: Synthetic oligonucleotide
guguggagcgcuguuguga

SEQ ID NO: 1407 - RNA, 19 nt, Artificial Sequence
  Description of Artificial Sequence: Synthetic oligonucleotide
uguggagcgcuguugugaa

SEQ ID NO: 1408 - RNA, 19 nt, Artificial Sequence
  Description of Artificial Sequence: Synthetic oligonucleotide
guggagcgcuguugugaau

SEQ ID NO: 1409 - RNA, 19 nt, Artificial Sequence
  Description of Artificial Sequence: Synthetic oligonucleotide
uggagcgcuguugugaauc

SEQ ID NO: 1410 - RNA, 19 nt, Artificial Sequence
  Description of Artificial Sequence: Synthetic oligonucleotide
ggagcgcuguugugaaucc

SEQ ID NO: 1411 - RNA, 19 nt, Artificial Sequence
  Description of Artificial Sequence: Synthetic oligonucleotide
gagcgcuguugugaauccc

SEQ ID NO: 1412 - RNA, 19 nt, Artificial Sequence
  Description of Artificial Sequence: Synthetic oligonucleotide
agcgcuguugugaaucccc

SEQ ID NO: 1413 - RNA, 19 nt, Artificial Sequence
  Description of Artificial Sequence: Synthetic oligonucleotide
gcgcuguugugaaucccca

SEQ ID NO: 1414 - RNA, 19 nt, Artificial Sequence
  Description of Artificial Sequence: Synthetic oligonucleotide
cgcuguugugaauccccag

SEQ ID NO: 1415 - RNA, 19 nt, Artificial Sequence
  Description of Artificial Sequence: Synthetic oligonucleotide
gcuguugugaauccccagu

SEQ ID NO: 1416 - RNA, 19 nt, Artificial Sequence
  Description of Artificial Sequence: Synthetic oligonucleotide
cuguugugaauccccaguc

SEQ ID NO: 1417 - RNA, 19 nt, Artificial Sequence
  Description of Artificial Sequence: Synthetic oligonucleotide
uguugugaauccccagucc

SEQ ID NO: 1418 - RNA, 19 nt, Artificial Sequence
  Description of Artificial Sequence: Synthetic oligonucleotide
guugugaauccccagucca

SEQ ID NO: 1419 - RNA, 19 nt, Artificial Sequence
  Description of Artificial Sequence: Synthetic oligonucleotide
uugugaauccccaguccau

SEQ ID NO: 1420 - RNA, 19 nt, Artificial Sequence
  Description of Artificial Sequence: Synthetic oligonucleotide
ugugaauccccaguccauc

SEQ ID NO: 1421 - RNA, 19 nt, Artificial Sequence
  Description of Artificial Sequence: Synthetic oligonucleotide
gugaauccccaguccaucc

SEQ ID NO: 1422 - RNA, 19 nt, Artificial Sequence
  Description of Artificial Sequence: Synthetic oligonucleotide
ugaauccccaguccaucca

SEQ ID NO: 1423 - RNA, 19 nt, Artificial Sequence
  Description of Artificial Sequence: Synthetic oligonucleotide
gaauccccaguccauccag

SEQ ID NO: 1424 - RNA, 19 nt, Artificial Sequence
  Description of Artificial Sequence: Synthetic oligonucleotide
aauccccaguccauccagg

SEQ ID NO: 1425 - RNA, 19 nt, Artificial Sequence
  Description of Artificial Sequence: Synthetic oligonucleotide
auccccaguccauccaggc

SEQ ID NO: 1426 - RNA, 19 nt, Artificial Sequence
  Description of Artificial Sequence: Synthetic oligonucleotide
uccccaguccauccaggcc

SEQ ID NO: 1427 - RNA, 19 nt, Artificial Sequence
  Description of Artificial Sequence: Synthetic oligonucleotide
ccccaguccauccaggccu

SEQ ID NO: 1428 - RNA, 19 nt, Artificial Sequence
  Description of Artificial Sequence: Synthetic oligonucleotide
cccaguccauccaggccuc

SEQ ID NO: 1429 - RNA, 19 nt, Artificial Sequence
  Description of Artificial Sequence: Synthetic oligonucleotide
ccaguccauccaggccucc

SEQ ID NO: 1430 - RNA, 19 nt, Artificial Sequence
  Description of Artificial Sequence: Synthetic oligonucleotide
caguccauccaggccuccg

SEQ ID NO: 1431 - RNA, 19 nt, Artificial Sequence
  Description of Artificial Sequence: Synthetic oligonucleotide
aguccauccaggccuccgg

SEQ ID NO: 1432 - RNA, 19 nt, Artificial Sequence
  Description of Artificial Sequence: Synthetic oligonucleotide
guccauccaggccuccggc

SEQ ID NO: 1433 - RNA, 19 nt, Artificial Sequence
  Description of Artificial Sequence: Synthetic oligonucleotide
uccauccaggccuccggcg

SEQ ID NO: 1434 - RNA, 19 nt, Artificial Sequence
  Description of Artificial Sequence: Synthetic oligonucleotide
ccauccaggccuccggcga

SEQ ID NO: 1435 - RNA, 19 nt, Artificial Sequence
  Description of Artificial Sequence: Synthetic oligonucleotide
cauccaggccuccggcgag

SEQ ID NO: 1436 - RNA, 19 nt, Artificial Sequence
  Description of Artificial Sequence: Synthetic oligonucleotide
auccaggccuccggcgagg

SEQ ID NO: 1437 - RNA, 19 nt, Artificial Sequence
  Description of Artificial Sequence: Synthetic oligonucleotide
uccaggccuccggcgaggc

SEQ ID NO: 1438 - RNA, 19 nt, Artificial Sequence
  Description of Artificial Sequence: Synthetic oligonucleotide
ccaggccuccggcgaggcc

SEQ ID NO: 1439 - RNA, 19 nt, Artificial Sequence
  Description of Artificial Sequence: Synthetic oligonucleotide
caggccuccggcgaggccu

SEQ ID NO: 1440 - RNA, 19 nt, Artificial Sequence
  Description of Artificial Sequence: Synthetic oligonucleotide
aggccuccggcgaggccuc

SEQ ID NO: 1441 - RNA, 19 nt, Artificial Sequence
  Description of Artificial Sequence: Synthetic oligonucleotide
ggccuccggcgaggccucg

SEQ ID NO: 1442 - RNA, 19 nt, Artificial Sequence
  Description of Artificial Sequence: Synthetic oligonucleotide
gccuccggcgaggccucga

SEQ ID NO: 1443 - RNA, 19 nt, Artificial Sequence
  Description of Artificial Sequence: Synthetic oligonucleotide
ccuccggcgaggccucgac

SEQ ID NO: 1444 - RNA, 19 nt, Artificial Sequence
  Description of Artificial Sequence: Synthetic oligonucleotide
cuccggcgaggccucgacu

SEQ ID NO: 1445 - RNA, 19 nt, Artificial Sequence
  Description of Artificial Sequence: Synthetic oligonucleotide
uccggcgaggccucgacuu

SEQ ID NO: 1446 - RNA, 19 nt, Artificial Sequence
  Description of Artificial Sequence: Synthetic oligonucleotide
ccggcgaggccucgacuuc

SEQ ID NO: 1447 - RNA, 19 nt, Artificial Sequence
  Description of Artificial Sequence: Synthetic oligonucleotide
cggcgaggccucgacuucu

SEQ ID NO: 1448 - RNA, 19 nt, Artificial Sequence
  Description of Artificial Sequence: Synthetic oligonucleotide
ggcgaggccucgacuucuu

SEQ ID NO: 1449 - RNA, 19 nt, Artificial Sequence
  Description of Artificial Sequence: Synthetic oligonucleotide
gcgaggccucgacuucuuc

SEQ ID NO: 1450 - RNA, 19 nt, Artificial Sequence
  Description of Artificial Sequence: Synthetic oligonucleotide
cgaggccucgacuucuucc

SEQ ID NO: 1451 - RNA, 19 nt, Artificial Sequence
  Description of Artificial Sequence: Synthetic oligonucleotide
gaggccucgacuucuucca

SEQ ID NO: 1452 - RNA, 19 nt, Artificial Sequence
  Description of Artificial Sequence: Synthetic oligonucleotide
aggccucgacuucuuccag

SEQ ID NO: 1453 - RNA, 19 nt, Artificial Sequence
  Description of Artificial Sequence: Synthetic oligonucleotide
ggccucgacuucuuccagu

SEQ ID NO: 1454 - RNA, 19 nt, Artificial Sequence
  Description of Artificial Sequence: Synthetic oligonucleotide
gccucgacuucuuccaguc

SEQ ID NO: 1455 - RNA, 19 nt, Artificial Sequence
  Description of Artificial Sequence: Synthetic oligonucleotide
ccucgacuucuuccagucg

SEQ ID NO: 1456 - RNA, 19 nt, Artificial Sequence
  Description of Artificial Sequence: Synthetic oligonucleotide
cucgacuucuuccagucgc

SEQ ID NO: 1457 - RNA, 19 nt, Artificial Sequence
  Description of Artificial Sequence: Synthetic oligonucleotide
ucgacuucuuccagucgcc

SEQ ID NO: 1458 - RNA, 19 nt, Artificial Sequence
  Description of Artificial Sequence: Synthetic oligonucleotide
cgacuucuuccagucgccc

SEQ ID NO: 1459 - RNA, 19 nt, Artificial Sequence
  Description of Artificial Sequence: Synthetic oligonucleotide
gacuucuuccagucgccca

SEQ ID NO: 1460 - RNA, 19 nt, Artificial Sequence
  Description of Artificial Sequence: Synthetic oligonucleotide
acuucuuccagucgcccag

SEQ ID NO: 1461 - RNA, 19 nt, Artificial Sequence
  Description of Artificial Sequence: Synthetic oligonucleotide
cuucuuccagucgcccagu

SEQ ID NO: 1462 - RNA, 19 nt, Artificial Sequence
  Description of Artificial Sequence: Synthetic oligonucleotide
uucuuccagucgcccaguu

SEQ ID NO: 1463 - RNA, 19 nt, Artificial Sequence
  Description of Artificial Sequence: Synthetic oligonucleotide
ucuuccagucgcccaguuu

SEQ ID NO: 1464 - RNA, 19 nt, Artificial Sequence
  Description of Artificial Sequence: Synthetic oligonucleotide
cuuccagucgcccaguuuu

SEQ ID NO: 1465 - RNA, 19 nt, Artificial Sequence
  Description of Artificial Sequence: Synthetic oligonucleotide
uuccagucgcccaguuuuu

SEQ ID NO: 1466 - RNA, 19 nt, Artificial Sequence
  Description of Artificial Sequence: Synthetic oligonucleotide
uccagucgcccaguuuuug

SEQ ID NO: 1467 - RNA, 19 nt, Artificial Sequence
  Description of Artificial Sequence: Synthetic oligonucleotide
ccagucgcccaguuuuugc

SEQ ID NO: 1468 - RNA, 19 nt, Artificial Sequence
  Description of Artificial Sequence: Synthetic oligonucleotide
cagucgcccaguuuuugcc

SEQ ID NO: 1469 - RNA, 19 nt, Artificial Sequence
  Description of Artificial Sequence: Synthetic oligonucleotide
agucgcccaguuuuugccc

SEQ ID NO: 1470 - RNA, 19 nt, Artificial Sequence
  Description of Artificial Sequence: Synthetic oligonucleotide
gucgcccaguuuuugcccc

SEQ ID NO: 1471 - RNA, 19 nt, Artificial Sequence
  Description of Artificial Sequence: Synthetic oligonucleotide
ucgcccaguuuuugcccca

SEQ ID NO: 1472 - RNA, 19 nt, Artificial Sequence
  Description of Artificial Sequence: Synthetic oligonucleotide
cgcccaguuuuugccccaa

SEQ ID NO: 1473 - RNA, 19 nt, Artificial Sequence
  Description of Artificial Sequence: Synthetic oligonucleotide
gcccaguuuuugccccaac

SEQ ID NO: 1474 - RNA, 19 nt, Artificial Sequence
  Description of Artificial Sequence: Synthetic oligonucleotide
cccaguuuuugccccaacc

SEQ ID NO: 1475 - RNA, 19 nt, Artificial Sequence
  Description of Artificial Sequence: Synthetic oligonucleotide
ccaguuuuugccccaaccc

SEQ ID NO: 1476 - RNA, 19 nt, Artificial Sequence
  Description of Artificial Sequence: Synthetic oligonucleotide
caguuuuugccccaacccg

SEQ ID NO: 1477 - RNA, 19 nt, Artificial Sequence
  Description of Artificial Sequence: Synthetic oligonucleotide
aguuuuugccccaacccgc

SEQ ID NO: 1478 - RNA, 19 nt, Artificial Sequence
  Description of Artificial Sequence: Synthetic oligonucleotide
guuuuugccccaacccgcc

SEQ ID NO: 1479 - RNA, 19 nt, Artificial Sequence
  Description of Artificial Sequence: Synthetic oligonucleotide
uuuuugccccaacccgccu

SEQ ID NO: 1480 - RNA, 19 nt, Artificial Sequence
  Description of Artificial Sequence: Synthetic oligonucleotide
uuuugccccaacccgccug

SEQ ID NO: 1481 - RNA, 19 nt, Artificial Sequence
  Description of Artificial Sequence: Synthetic oligonucleotide
uuugccccaacccgccugg

SEQ ID NO: 1482 - RNA, 19 nt, Artificial Sequence
  Description of Artificial Sequence: Synthetic oligonucleotide
uugccccaacccgccuggc

SEQ ID NO: 1483 - RNA, 19 nt, Artificial Sequence
  Description of Artificial Sequence: Synthetic oligonucleotide
ugccccaacccgccuggcc

SEQ ID NO: 1484 - RNA, 19 nt, Artificial Sequence
  Description of Artificial Sequence: Synthetic oligonucleotide
gccccaacccgccuggccu

SEQ ID NO: 1485 - RNA, 19 nt, Artificial Sequence
  Description of Artificial Sequence: Synthetic oligonucleotide
ccccaacccgccuggccug

SEQ ID NO: 1486 - RNA, 19 nt, Artificial Sequence
  Description of Artificial Sequence: Synthetic oligonucleotide
cccaacccgccuggccugg

SEQ ID NO: 1487 - RNA, 19 nt, Artificial Sequence
  Description of Artificial Sequence: Synthetic oligonucleotide
ccaacccgccuggccugga

SEQ ID NO: 1488 - RNA, 19 nt, Artificial Sequence
  Description of Artificial Sequence: Synthetic oligonucleotide
caacccgccuggccuggaa

SEQ ID NO: 1489 - RNA, 19 nt, Artificial Sequence
  Description of Artificial Sequence: Synthetic oligonucleotide
aacccgccuggccuggaag

SEQ ID NO: 1490 - RNA, 19 nt, Artificial Sequence
  Description of Artificial Sequence: Synthetic oligonucleotide
acccgccuggccuggaagc

SEQ ID NO: 1491 - RNA, 19 nt, Artificial Sequence
  Description of Artificial Sequence: Synthetic oligonucleotide
cccgccuggccuggaagcc

SEQ ID NO: 1492 - RNA, 19 nt, Artificial Sequence
  Description of Artificial Sequence: Synthetic oligonucleotide
ccgccuggccuggaagccc

SEQ ID NO: 1493 - RNA, 19 nt, Artificial Sequence
  Description of Artificial Sequence: Synthetic oligonucleotide
cgccuggccuggaagcccu

SEQ ID NO: 1494 - RNA, 19 nt, Artificial Sequence
  Description of Artificial Sequence: Synthetic oligonucleotide
gccuggccuggaagcccuc

SEQ ID NO: 1495 - RNA, 19 nt, Artificial Sequence
  Description of Artificial Sequence: Synthetic oligonucleotide
ccuggccuggaagcccuca

SEQ ID NO: 1496 - RNA, 19 nt, Artificial Sequence
  Description of Artificial Sequence: Synthetic oligonucleotide
cuggccuggaagcccucag

SEQ ID NO: 1497 - RNA, 19 nt, Artificial Sequence
  Description of Artificial Sequence: Synthetic oligonucleotide
uggccuggaagcccucagc

SEQ ID NO: 1498 - RNA, 19 nt, Artificial Sequence
  Description of Artificial Sequence: Synthetic oligonucleotide
ggccuggaagcccucagcc

SEQ ID NO: 1499 - RNA, 19 nt, Artificial Sequence
  Description of Artificial Sequence: Synthetic oligonucleotide
gccuggaagcccucagccc

SEQ ID NO: 1500 - RNA, 19 nt, Artificial Sequence
  Description of Artificial Sequence: Synthetic oligonucleotide
ccuggaagcccucagcccc

SEQ ID NO: 1501 - RNA, 19 nt, Artificial Sequence
  Description of Artificial Sequence: Synthetic oligonucleotide
cuggaagcccucagcccca

SEQ ID NO: 1502 - RNA, 19 nt, Artificial Sequence
  Description of Artificial Sequence: Synthetic oligonucleotide
uggaagcccucagccccaa

SEQ ID NO: 1503 - RNA, 19 nt, Artificial Sequence
  Description of Artificial Sequence: Synthetic oligonucleotide
ggaagcccucagccccaac

SEQ ID NO: 1504 - RNA, 19 nt, Artificial Sequence
  Description of Artificial Sequence: Synthetic oligonucleotide
gaagcccucagccccaaca

SEQ ID NO: 1505 - RNA, 19 nt, Artificial Sequence
  Description of Artificial Sequence: Synthetic oligonucleotide
aagcccucagccccaacac

SEQ ID NO: 1506 - RNA, 19 nt, Artificial Sequence
  Description of Artificial Sequence: Synthetic oligonucleotide
agcccucagccccaacacc

SEQ ID NO: 1507 - RNA, 19 nt, Artificial Sequence
  Description of Artificial Sequence: Synthetic oligonucleotide
gcccucagccccaacacca

SEQ ID NO: 1508 - RNA, 19 nt, Artificial Sequence
  Description of Artificial Sequence: Synthetic oligonucleotide
cccucagccccaacaccag

SEQ ID NO: 1509 - RNA, 19 nt, Artificial Sequence
  Description of Artificial Sequence: Synthetic oligonucleotide
ccucagccccaacaccagc

SEQ ID NO: 1510 - RNA, 19 nt, Artificial Sequence
  Description of Artificial Sequence: Synthetic oligonucleotide
cucagccccaacaccagcu

SEQ ID NO: 1511 - RNA, 19 nt, Artificial Sequence
  Description of Artificial Sequence: Synthetic oligonucleotide
ucagccccaacaccagcug

SEQ ID NO: 1512 - RNA, 19 nt, Artificial Sequence
  Description of Artificial Sequence: Synthetic oligonucleotide
cagccccaacaccagcugc

SEQ ID NO: 1513 - RNA, 19 nt, Artificial Sequence
  Description of Artificial Sequence: Synthetic oligonucleotide
agccccaacaccagcugcc

SEQ ID NO: 1514 - RNA, 19 nt, Artificial Sequence
  Description of Artificial Sequence: Synthetic oligonucleotide
gccccaacaccagcugccg

SEQ ID NO: 1515 - RNA, 19 nt, Artificial Sequence
  Description of Artificial Sequence: Synthetic oligonucleotide
ccccaacaccagcugccgc

SEQ ID NO: 1516 - RNA, 19 nt, Artificial Sequence
  Description of Artificial Sequence: Synthetic oligonucleotide
cccaacaccagcugccgcc

SEQ ID NO: 1517 - RNA, 19 nt, Artificial Sequence
  Description of Artificial Sequence: Synthetic oligonucleotide
ccaacaccagcugccgcca

SEQ ID NO: 1518 - RNA, 19 nt, Artificial Sequence
  Description of Artificial Sequence: Synthetic oligonucleotide
caacaccagcugccgccac

SEQ ID NO: 1519 - RNA, 19 nt, Artificial Sequence
  Description of Artificial Sequence: Synthetic oligonucleotide
aacaccagcugccgccacu

SEQ ID NO: 1520 - RNA, 19 nt, Artificial Sequence
  Description of Artificial Sequence: Synthetic oligonucleotide
acaccagcugccgccacuu

SEQ ID NO: 1521 - RNA, 19 nt, Artificial Sequence
  Description of Artificial Sequence: Synthetic oligonucleotide
caccagcugccgccacuuc

SEQ ID NO: 1522 - RNA, 19 nt, Artificial Sequence
  Description of Artificial Sequence: Synthetic oligonucleotide
accagcugccgccacuucc

SEQ ID NO: 1523 - RNA, 19 nt, Artificial Sequence
  Description of Artificial Sequence: Synthetic oligonucleotide
ccagcugccgccacuuccc

SEQ ID NO: 1524 - RNA, 19 nt, Artificial Sequence
  Description of Artificial Sequence: Synthetic oligonucleotide
cagcugccgccacuucccu

SEQ ID NO: 1525 - RNA, 19 nt, Artificial Sequence
  Description of Artificial Sequence: Synthetic oligonucleotide
agcugccgccacuucccuc

SEQ ID NO: 1526 - RNA, 19 nt, Artificial Sequence
  Description of Artificial Sequence: Synthetic oligonucleotide
gcugccgccacuucccucu

SEQ ID NO: 1527 - RNA, 19 nt, Artificial Sequence
  Description of Artificial Sequence: Synthetic oligonucleotide
cugccgccacuucccucug

SEQ ID NO: 1528 - RNA, 19 nt, Artificial Sequence
  Description of Artificial Sequence: Synthetic oligonucleotide
ugccgccacuucccucugc

SEQ ID NO: 1529 - RNA, 19 nt, Artificial Sequence
  Description of Artificial Sequence: Synthetic oligonucleotide
gccgccacuucccucugcu

SEQ ID NO: 1530 - RNA, 19 nt, Artificial Sequence
  Description of Artificial Sequence: Synthetic oligonucleotide
ccgccacuucccucugcug

SEQ ID NO: 1531 - RNA, 19 nt, Artificial Sequence
  Description of Artificial Sequence: Synthetic oligonucleotide
cgccacuucccucugcugg

SEQ ID NO: 1532 - RNA, 19 nt, Artificial Sequence
  Description of Artificial Sequence: Synthetic oligonucleotide
gccacuucccucugcuggu

SEQ ID NO: 1533 - RNA, 19 nt, Artificial Sequence
  Description of Artificial Sequence: Synthetic oligonucleotide
ccacuucccucugcugguc

SEQ ID NO: 1534 - RNA, 19 nt, Artificial Sequence
  Description of Artificial Sequence: Synthetic oligonucleotide
cacuucccucugcugguca

SEQ ID NO: 1535 - RNA, 19 nt, Artificial Sequence
  Description of Artificial Sequence: Synthetic oligonucleotide
acuucccucugcuggucag

SEQ ID NO: 1536 - RNA, 19 nt, Artificial Sequence
  Description of Artificial Sequence: Synthetic oligonucleotide
cuucccucugcuggucagu

SEQ ID NO: 1537 - RNA, 19 nt, Artificial Sequence
  Description of Artificial Sequence: Synthetic oligonucleotide
uucccucugcuggucagua

SEQ ID NO: 1538 - RNA, 19 nt, Artificial Sequence
  Description of Artificial Sequence: Synthetic oligonucleotide
ucccucugcuggucaguag

SEQ ID NO: 1539 - RNA, 19 nt, Artificial Sequence
  Description of Artificial Sequence: Synthetic oligonucleotide
cccucugcuggucaguagc

SEQ ID NO: 1540 - RNA, 19 nt, Artificial Sequence
  Description of Artificial Sequence: Synthetic oligonucleotide
ccucugcuggucaguagca

SEQ ID NO: 1541 - RNA, 19 nt, Artificial Sequence
  Description of Artificial Sequence: Synthetic oligonucleotide
cucugcuggucaguagcag

SEQ ID NO: 1542 - RNA, 19 nt, Artificial Sequence
  Description of Artificial Sequence: Synthetic oligonucleotide
ucugcuggucaguagcagc

SEQ ID NO: 1543 - RNA, 19 nt, Artificial Sequence
  Description of Artificial Sequence: Synthetic oligonucleotide
cugcuggucaguagcagcu

SEQ ID NO: 1544 - RNA, 19 nt, Artificial Sequence
  Description of Artificial Sequence: Synthetic oligonucleotide
ugcuggucaguagcagcuu

SEQ ID NO: 1545 - RNA, 19 nt, Artificial Sequence
  Description of Artificial Sequence: Synthetic oligonucleotide
gcuggucaguagcagcuuc

SEQ ID NO: 1546 - RNA, 19 nt, Artificial Sequence
  Description of Artificial Sequence: Synthetic oligonucleotide
cuggucaguagcagcuucu

SEQ ID NO: 1547 - RNA, 19 nt, Artificial Sequence
  Description of Artificial Sequence: Synthetic oligonucleotide
uggucaguagcagcuucuc

SEQ ID NO: 1548 - RNA, 19 nt, Artificial Sequence
  Description of Artificial Sequence: Synthetic oligonucleotide
ggucaguagcagcuucuca

SEQ ID NO: 1549 - RNA, 19 nt, Artificial Sequence
  Description of Artificial Sequence: Synthetic oligonucleotide
gucaguagcagcuucucac

SEQ ID NO: 1550 - RNA, 19 nt, Artificial Sequence
  Description of Artificial Sequence: Synthetic oligonucleotide
ucaguagcagcuucucacg

SEQ ID NO: 1551 - RNA, 19 nt, Artificial Sequence
  Description of Artificial Sequence: Synthetic oligonucleotide
caguagcagcuucucacgu

SEQ ID NO: 1552 - RNA, 19 nt, Artificial Sequence
  Description of Artificial Sequence: Synthetic oligonucleotide
aguagcagcuucucacgug

SEQ ID NO: 1553 - RNA, 19 nt, Artificial Sequence
  Description of Artificial Sequence: Synthetic oligonucleotide
guagcagcuucucacgugu

SEQ ID NO: 1554 - RNA, 19 nt, Artificial Sequence
  Description of Artificial Sequence: Synthetic oligonucleotide
uagcagcuucucacgugug

SEQ ID NO: 1555 - RNA, 19 nt, Artificial Sequence
  Description of Artificial Sequence: Synthetic oligonucleotide
agcagcuucucacgugugg

SEQ ID NO: 1556 - RNA, 19 nt, Artificial Sequence
  Description of Artificial Sequence: Synthetic oligonucleotide
gcagcuucucacgugugga

SEQ ID NO: 1557 - RNA, 19 nt, Artificial Sequence
  Description of Artificial Sequence: Synthetic oligonucleotide
cagcuucucacguguggac

SEQ ID NO: 1558 - RNA, 19 nt, Artificial Sequence
  Description of Artificial Sequence: Synthetic oligonucleotide
agcuucucacguguggacc

SEQ ID NO: 1559 - RNA, 19 nt, Artificial Sequence
  Description of Artificial Sequence: Synthetic oligonucleotide
gcuucucacguguggaccu

SEQ ID NO: 1560 - RNA, 19 nt, Artificial Sequence
  Description of Artificial Sequence: Synthetic oligonucleotide
cuucucacguguggaccua

SEQ ID NO: 1561 - RNA, 19 nt, Artificial Sequence
  Description of Artificial Sequence: Synthetic oligonucleotide
uucucacguguggaccuau

SEQ ID NO: 1562 - RNA, 19 nt, Artificial Sequence
  Description of Artificial Sequence: Synthetic oligonucleotide
ucucacguguggaccuauu

SEQ ID NO: 1563 - RNA, 19 nt, Artificial Sequence
  Description of Artificial Sequence: Synthetic oligonucleotide
cucacguguggaccuauuc

SEQ ID NO: 1564 - RNA, 19 nt, Artificial Sequence
  Description of Artificial Sequence: Synthetic oligonucleotide
ucacguguggaccuauuca

SEQ ID NO: 1565 - RNA, 19 nt, Artificial Sequence
  Description of Artificial Sequence: Synthetic oligonucleotide
cacguguggaccuauucaa

SEQ ID NO: 1566 - RNA, 19 nt, Artificial Sequence
  Description of Artificial Sequence: Synthetic oligonucleotide
acguguggaccuauucaau

SEQ ID NO: 1567 - RNA, 19 nt, Artificial Sequence
  Description of Artificial Sequence: Synthetic oligonucleotide
cguguggaccuauucaaug

SEQ ID NO: 1568 - RNA, 19 nt, Artificial Sequence
  Description of Artificial Sequence: Synthetic oligonucleotide
guguggaccuauucaaugg

SEQ ID NO: 1569 - RNA, 19 nt, Artificial Sequence
  Description of Artificial Sequence: Synthetic oligonucleotide
uguggaccuauucaauggg

SEQ ID NO: 1570 - RNA, 19 nt, Artificial Sequence
  Description of Artificial Sequence: Synthetic oligonucleotide
guggaccuauucaaugggc

SEQ ID NO: 1571 - RNA, 19 nt, Artificial Sequence
  Description of Artificial Sequence: Synthetic oligonucleotide
uggaccuauucaaugggcu

SEQ ID NO: 1572 - RNA, 19 nt, Artificial Sequence
  Description of Artificial Sequence: Synthetic oligonucleotide
ggaccuauucaaugggcug

SEQ ID NO: 1573 - RNA, 19 nt, Artificial Sequence
  Description of Artificial Sequence: Synthetic oligonucleotide
gaccuauucaaugggcugu

SEQ ID NO: 1574 - RNA, 19 nt, Artificial Sequence
  Description of Artificial Sequence: Synthetic oligonucleotide
accuauucaaugggcuguu

SEQ ID NO: 1575 - RNA, 19 nt, Artificial Sequence
  Description of Artificial Sequence: Synthetic oligonucleotide
ccuauucaaugggcuguug

SEQ ID NO: 1576 - RNA, 19 nt, Artificial Sequence
  Description of Artificial Sequence: Synthetic oligonucleotide
cuauucaaugggcuguugg

SEQ ID NO: 1577 - RNA, 19 nt, Artificial Sequence
  Description of Artificial Sequence: Synthetic oligonucleotide
uauucaaugggcuguuggg

SEQ ID NO: 1578 - RNA, 19 nt, Artificial Sequence
  Description of Artificial Sequence: Synthetic oligonucleotide
auucaaugggcuguuggga

SEQ ID NO: 1579 - RNA, 19 nt, Artificial Sequence
  Description of Artificial Sequence: Synthetic oligonucleotide
uucaaugggcuguugggac

SEQ ID NO: 1580 - RNA, 19 nt, Artificial Sequence
  Description of Artificial Sequence: Synthetic oligonucleotide
ucaaugggcuguugggacc

SEQ ID NO: 1581 - RNA, 19 nt, Artificial Sequence
  Description of Artificial Sequence: Synthetic oligonucleotide
caaugggcuguugggacca

SEQ ID NO: 1582 - RNA, 19 nt, Artificial Sequence
  Description of Artificial Sequence: Synthetic oligonucleotide
aaugggcuguugggaccag

SEQ ID NO: 1583 - RNA, 19 nt, Artificial Sequence
  Description of Artificial Sequence: Synthetic oligonucleotide
augggcuguugggaccagu

SEQ ID NO: 1584 - RNA, 19 nt, Artificial Sequence
  Description of Artificial Sequence: Synthetic oligonucleotide
ugggcuguugggaccagua

SEQ ID NO: 1585 - RNA, 19 nt, Artificial Sequence
  Description of Artificial Sequence: Synthetic oligonucleotide
gggcuguugggaccaguac

SEQ ID NO: 1586 - RNA, 19 nt, Artificial Sequence
  Description of Artificial Sequence: Synthetic oligonucleotide
ggcuguugggaccaguaca

SEQ ID NO: 1587 - RNA, 19 nt, Artificial Sequence
  Description of Artificial Sequence: Synthetic oligonucleotide
gcuguugggaccaguacag

SEQ ID NO: 1588 - RNA, 19 nt, Artificial Sequence
  Description of Artificial Sequence: Synthetic oligonucleotide
cuguugggaccaguacagg

SEQ ID NO: 1589 - RNA, 19 nt, Artificial Sequence
  Description of Artificial Sequence: Synthetic oligonucleotide
uguugggaccaguacaggu

SEQ ID NO: 1590 - RNA, 19 nt, Artificial Sequence
  Description of Artificial Sequence: Synthetic oligonucleotide
guugggaccaguacagguc

SEQ ID NO: 1591 - RNA, 19 nt, Artificial Sequence
  Description of Artificial Sequence: Synthetic oligonucleotide
uugggaccaguacagguca

SEQ ID NO: 1592 - RNA, 19 nt, Artificial Sequence
  Description of Artificial Sequence: Synthetic oligonucleotide
ugggaccaguacaggucac

SEQ ID NO: 1593 - RNA, 19 nt, Artificial Sequence
  Description of Artificial Sequence: Synthetic oligonucleotide
gggaccaguacaggucacu

SEQ ID NO: 1594 - RNA, 19 nt, Artificial Sequence
  Description of Artificial Sequence: Synthetic oligonucleotide
ggaccaguacaggucacug

SEQ ID NO: 1595 - RNA, 19 nt, Artificial Sequence
  Description of Artificial Sequence: Synthetic oligonucleotide
gaccaguacaggucacugc

SEQ ID NO: 1596 - RNA, 19 nt, Artificial Sequence
  Description of Artificial Sequence: Synthetic oligonucleotide
accaguacaggucacugca

SEQ ID NO: 1597 - RNA, 19 nt, Artificial Sequence
  Description of Artificial Sequence: Synthetic oligonucleotide
ccaguacaggucacugcau

SEQ ID NO: 1598 - RNA, 19 nt, Artificial Sequence
  Description of Artificial Sequence: Synthetic oligonucleotide
caguacaggucacugcauu

SEQ ID NO: 1599 - RNA, 19 nt, Artificial Sequence
  Description of Artificial Sequence: Synthetic oligonucleotide
aguacaggucacugcauug

SEQ ID NO: 1600 - RNA, 19 nt, Artificial Sequence
  Description of Artificial Sequence: Synthetic oligonucleotide
guacaggucacugcauugu

SEQ ID NO: 1601 - RNA, 19 nt, Artificial Sequence
  Description of Artificial Sequence: Synthetic oligonucleotide
uacaggucacugcauugua

SEQ ID NO: 1602 - RNA, 19 nt, Artificial Sequence
  Description of Artificial Sequence: Synthetic oligonucleotide
acaggucacugcauuguau

SEQ ID NO: 1603 - RNA, 19 nt, Artificial Sequence
  Description of Artificial Sequence: Synthetic oligonucleotide
caggucacugcauuguaug

SEQ ID NO: 1604 - RNA, 19 nt, Artificial Sequence
  Description of Artificial Sequence: Synthetic oligonucleotide
aggucacugcauuguaugu

SEQ ID NO: 1605 - RNA, 19 nt, Artificial Sequence
  Description of Artificial Sequence: Synthetic oligonucleotide
ggucacugcauuguaugug

SEQ ID NO: 1606 - RNA, 19 nt, Artificial Sequence
  Description of Artificial Sequence: Synthetic oligonucleotide
gucacugcauuguauguga

SEQ ID NO: 1607 - RNA, 19 nt, Artificial Sequence
  Description of Artificial Sequence: Synthetic oligonucleotide
ucacugcauuguaugugac

SEQ ID NO: 1608 - RNA, 19 nt, Artificial Sequence
  Description of Artificial Sequence: Synthetic oligonucleotide
cacugcauuguaugugaca

SEQ ID NO: 1609 - RNA, 19 nt, Artificial Sequence
  Description of Artificial Sequence: Synthetic oligonucleotide
acugcauuguaugugacac

SEQ ID NO: 1610 - RNA, 19 nt, Artificial Sequence
  Description of Artificial Sequence: Synthetic oligonucleotide
cugcauuguaugugacacg

SEQ ID NO: 1611 - RNA, 19 nt, Artificial Sequence
  Description of Artificial Sequence: Synthetic oligonucleotide
ugcauuguaugugacacgc

SEQ ID NO: 1612 - RNA, 19 nt, Artificial Sequence
  Description of Artificial Sequence: Synthetic oligonucleotide
gcauuguaugugacacgcc

SEQ ID NO: 1613 - RNA, 19 nt, Artificial Sequence
  Description of Artificial Sequence: Synthetic oligonucleotide
cauuguaugugacacgccu

SEQ ID NO: 1614 - RNA, 19 nt, Artificial Sequence
  Description of Artificial Sequence: Synthetic oligonucleotide
auuguaugugacacgccuu

SEQ ID NO: 1615 - RNA, 19 nt, Artificial Sequence
  Description of Artificial Sequence: Synthetic oligonucleotide
uuguaugugacacgccuug

SEQ ID NO: 1616 - RNA, 19 nt, Artificial Sequence
  Description of Artificial Sequence: Synthetic oligonucleotide
uguaugugacacgccuuga

SEQ ID NO: 1617 - RNA, 19 nt, Artificial Sequence
  Description of Artificial Sequence: Synthetic oligonucleotide
guaugugacacgccuugac

SEQ ID NO: 1618 - RNA, 19 nt, Artificial Sequence
  Description of Artificial Sequence: Synthetic oligonucleotide
uaugugacacgccuugaca

SEQ ID NO: 1619 - RNA, 19 nt, Artificial Sequence
  Description of Artificial Sequence: Synthetic oligonucleotide
augugacacgccuugacaa

SEQ ID NO: 1620 - RNA, 19 nt, Artificial Sequence
  Description of Artificial Sequence: Synthetic oligonucleotide
ugugacacgccuugacaac

SEQ ID NO: 1621 - RNA, 19 nt, Artificial Sequence
  Description of Artificial Sequence: Synthetic oligonucleotide
gugacacgccuugacaacg

SEQ ID NO: 1622 - RNA, 19 nt, Artificial Sequence
  Description of Artificial Sequence: Synthetic oligonucleotide
ugacacgccuugacaacgu

SEQ ID NO: 1623 - RNA, 19 nt, Artificial Sequence
  Description of Artificial Sequence: Synthetic oligonucleotide
gacacgccuugacaacguc

SEQ ID NO: 1624 - RNA, 19 nt, Artificial Sequence
  Description of Artificial Sequence: Synthetic oligonucleotide
acacgccuugacaacguca

SEQ ID NO: 1625 - RNA, 19 nt, Artificial Sequence
  Description of Artificial Sequence: Synthetic oligonucleotide
cacgccuugacaacgucac

SEQ ID NO: 1626 - RNA, 19 nt, Artificial Sequence
  Description of Artificial Sequence: Synthetic oligonucleotide
acgccuugacaacgucaca

SEQ ID NO: 1627 - RNA, 19 nt, Artificial Sequence
  Description of Artificial Sequence: Synthetic oligonucleotide
cgccuugacaacgucacag

SEQ ID NO: 1628 - RNA, 19 nt, Artificial Sequence
  Description of Artificial Sequence: Synthetic oligonucleotide
gccuugacaacgucacagu

SEQ ID NO: 1629 - RNA, 19 nt, Artificial Sequence
  Description of Artificial Sequence: Synthetic oligonucleotide
ccuugacaacgucacagug

SEQ ID NO: 1630 - RNA, 19 nt, Artificial Sequence
  Description of Artificial Sequence: Synthetic oligonucleotide
cuugacaacgucacagugg

SEQ ID NO: 1631 - RNA, 19 nt, Artificial Sequence
  Description of Artificial Sequence: Synthetic oligonucleotide
uugacaacgucacaguggc

SEQ ID NO: 1632 - RNA, 19 nt, Artificial Sequence
  Description of Artificial Sequence: Synthetic oligonucleotide
ugacaacgucacaguggca

SEQ ID NO: 1633 - RNA, 19 nt, Artificial Sequence
  Description of Artificial Sequence: Synthetic oligonucleotide
gacaacgucacaguggcac

SEQ ID NO: 1634 - RNA, 19 nt, Artificial Sequence
  Description of Artificial Sequence: Synthetic oligonucleotide
acaacgucacaguggcaca

SEQ ID NO: 1635 - RNA, 19 nt, Artificial Sequence
  Description of Artificial Sequence: Synthetic oligonucleotide
caacgucacaguggcacac

SEQ ID NO: 1636 - RNA, 19 nt, Artificial Sequence
  Description of Artificial Sequence: Synthetic oligonucleotide
aacgucacaguggcacaca

SEQ ID NO: 1637 - RNA, 19 nt, Artificial Sequence
  Description of Artificial Sequence: Synthetic oligonucleotide
acgucacaguggcacacau

SEQ ID NO: 1638 - RNA, 19 nt, Artificial Sequence
  Description of Artificial Sequence: Synthetic oligonucleotide
cgucacaguggcacacaug

SEQ ID NO: 1639 - RNA, 19 nt, Artificial Sequence
  Description of Artificial Sequence: Synthetic oligonucleotide
gucacaguggcacacaugg

SEQ ID NO: 1640 - RNA, 19 nt, Artificial Sequence
  Description of Artificial Sequence: Synthetic oligonucleotide
ucacaguggcacacauggg

SEQ ID NO: 1641 - RNA, 19 nt, Artificial Sequence
  Description of Artificial Sequence: Synthetic oligonucleotide
cacaguggcacacaugggc

SEQ ID NO: 1642 - RNA, 19 nt, Artificial Sequence
  Description of Artificial Sequence: Synthetic oligonucleotide
acaguggcacacaugggca

SEQ ID NO: 1643 - RNA, 19 nt, Artificial Sequence
  Description of Artificial Sequence: Synthetic oligonucleotide
caguggcacacaugggcac

SEQ ID NO: 1644 - RNA, 19 nt, Artificial Sequence
  Description of Artificial Sequence: Synthetic oligonucleotide
aguggcacacaugggcaca

SEQ ID NO: 1645 - RNA, 19 nt, Artificial Sequence
  Description of Artificial Sequence: Synthetic oligonucleotide
guggcacacaugggcacaa

SEQ ID NO: 1646 - RNA, 19 nt, Artificial Sequence
  Description of Artificial Sequence: Synthetic oligonucleotide
uggcacacaugggcacaau

SEQ ID NO: 1647 - RNA, 19 nt, Artificial Sequence
  Description of Artificial Sequence: Synthetic oligonucleotide
ggcacacaugggcacaaug

SEQ ID NO: 1648 - RNA, 19 nt, Artificial Sequence
  Description of Artificial Sequence: Synthetic oligonucleotide
gcacacaugggcacaaugg

SEQ ID NO: 1649 - RNA, 19 nt, Artificial Sequence
  Description of Artificial Sequence: Synthetic oligonucleotide
cacacaugggcacaaugga

SEQ ID NO: 1650 - RNA, 19 nt, Artificial Sequence
  Description of Artificial Sequence: Synthetic oligonucleotide
acacaugggcacaauggau

SEQ ID NO: 1651 - RNA, 19 nt, Artificial Sequence
  Description of Artificial Sequence: Synthetic oligonucleotide
cacaugggcacaauggaug

SEQ ID NO: 1652 - RNA, 19 nt, Artificial Sequence
  Description of Artificial Sequence: Synthetic oligonucleotide
acaugggcacaauggaugg

SEQ ID NO: 1653 - RNA, 19 nt, Artificial Sequence
  Description of Artificial Sequence: Synthetic oligonucleotide
caugggcacaauggauggg

SEQ ID NO: 1654 - RNA, 19 nt, Artificial Sequence
  Description of Artificial Sequence: Synthetic oligonucleotide
augggcacaauggaugggc

SEQ ID NO: 1655 - RNA, 19 nt, Artificial Sequence
  Description of Artificial Sequence: Synthetic oligonucleotide
ugggcacaauggaugggcg

SEQ ID NO: 1656 - RNA, 19 nt, Artificial Sequence
  Description of Artificial Sequence: Synthetic oligonucleotide
gggcacaauggaugggcgu

SEQ ID NO: 1657 - RNA, 19 nt, Artificial Sequence
  Description of Artificial Sequence: Synthetic oligonucleotide
ggcacaauggaugggcgua

SEQ ID NO: 1658 - RNA, 19 nt, Artificial Sequence
  Description of Artificial Sequence: Synthetic oligonucleotide
gcacaauggaugggcguau

SEQ ID NO: 1659 - RNA, 19 nt, Artificial Sequence
  Description of Artificial Sequence: Synthetic oligonucleotide
cacaauggaugggcguauc

SEQ ID NO: 1660 - RNA, 19 nt, Artificial Sequence
  Description of Artificial Sequence: Synthetic oligonucleotide
acaauggaugggcguaucc

SEQ ID NO: 1661 - RNA, 19 nt, Artificial Sequence
  Description of Artificial Sequence: Synthetic oligonucleotide
caauggaugggcguauccu

SEQ ID NO: 1662 - RNA, 19 nt, Artificial Sequence
  Description of Artificial Sequence: Synthetic oligonucleotide
aauggaugggcguauccug

SEQ ID NO: 1663 - RNA, 19 nt, Artificial Sequence
  Description of Artificial Sequence: Synthetic oligonucleotide
auggaugggcguauccugc

SEQ ID NO: 1664 - RNA, 19 nt, Artificial Sequence
  Description of Artificial Sequence: Synthetic oligonucleotide
uggaugggcguauccugca

SEQ ID NO: 1665 - RNA, 19 nt, Artificial Sequence
  Description of Artificial Sequence: Synthetic oligonucleotide
ggaugggcguauccugcag

SEQ ID NO: 1666 - RNA, 19 nt, Artificial Sequence
  Description of Artificial Sequence: Synthetic oligonucleotide
gaugggcguauccugcagg

SEQ ID NO: 1667 - RNA, 19 nt, Artificial Sequence
  Description of Artificial Sequence: Synthetic oligonucleotide
augggcguauccugcaggu

SEQ ID NO: 1668 - RNA, 19 nt, Artificial Sequence
  Description of Artificial Sequence: Synthetic oligonucleotide
ugggcguauccugcaggug

SEQ ID NO: 1669 - RNA, 19 nt, Artificial Sequence
  Description of Artificial Sequence: Synthetic oligonucleotide
gggcguauccugcaggugg

SEQ ID NO: 1670 - RNA, 19 nt, Artificial Sequence
  Description of Artificial Sequence: Synthetic oligonucleotide
ggcguauccugcaggugga

SEQ ID NO: 1671 - RNA, 19 nt, Artificial Sequence
  Description of Artificial Sequence: Synthetic oligonucleotide
gcguauccugcagguggag

SEQ ID NO: 1672 - RNA, 19 nt, Artificial Sequence
  Description of Artificial Sequence: Synthetic oligonucleotide
cguauccugcagguggagc

SEQ ID NO: 1673 - RNA, 19 nt, Artificial Sequence
  Description of Artificial Sequence: Synthetic oligonucleotide
guauccugcagguggagcu

SEQ ID NO: 1674 - RNA, 19 nt, Artificial Sequence
  Description of Artificial Sequence: Synthetic oligonucleotide
uauccugcagguggagcug

SEQ ID NO: 1675 - RNA, 19 nt, Artificial Sequence
  Description of Artificial Sequence: Synthetic oligonucleotide
auccugcagguggagcugg

SEQ ID NO: 1676 - RNA, 19 nt, Artificial Sequence
  Description of Artificial Sequence: Synthetic oligonucleotide
uccugcagguggagcuggu

SEQ ID NO: 1677 - RNA, 19 nt, Artificial Sequence
  Description of Artificial Sequence: Synthetic oligonucleotide
ccugcagguggagcugguc

SEQ ID NO: 1678 - RNA, 19 nt, Artificial Sequence
  Description of Artificial Sequence: Synthetic oligonucleotide
cugcagguggagcugguca

SEQ ID NO: 1679 - RNA, 19 nt, Artificial Sequence
  Description of Artificial Sequence: Synthetic oligonucleotide
ugcagguggagcuggucag

SEQ ID NO: 1680 - RNA, 19 nt, Artificial Sequence
  Description of Artificial Sequence: Synthetic oligonucleotide
gcagguggagcuggucagg

SEQ ID NO: 1681 - RNA, 19 nt, Artificial Sequence
  Description of Artificial Sequence: Synthetic oligonucleotide
cagguggagcuggucaggu

SEQ ID NO: 1682 - RNA, 19 nt, Artificial Sequence
  Description of Artificial Sequence: Synthetic oligonucleotide
agguggagcuggucagguc

SEQ ID NO: 1683 - RNA, 19 nt, Artificial Sequence
  Description of Artificial Sequence: Synthetic oligonucleotide
gguggagcuggucagguca

SEQ ID NO: 1684 - RNA, 19 nt, Artificial Sequence
  Description of Artificial Sequence: Synthetic oligonucleotide
guggagcuggucaggucac

SEQ ID NO: 1685 - RNA, 19 nt, Artificial Sequence
  Description of Artificial Sequence: Synthetic oligonucleotide
uggagcuggucaggucacu

SEQ ID NO: 1686 - RNA, 19 nt, Artificial Sequence
  Description of Artificial Sequence: Synthetic oligonucleotide
ggagcuggucaggucacua

SEQ ID NO: 1687 - RNA, 19 nt, Artificial Sequence
  Description of Artificial Sequence: Synthetic oligonucleotide
gagcuggucaggucacuaa

SEQ ID NO: 1688 - RNA, 19 nt, Artificial Sequence
  Description of Artificial Sequence: Synthetic oligonucleotide
agcuggucaggucacuaaa

SEQ ID NO: 1689 - RNA, 19 nt, Artificial Sequence
  Description of Artificial Sequence: Synthetic oligonucleotide
gcuggucaggucacuaaac

SEQ ID NO: 1690 - RNA, 19 nt, Artificial Sequence
  Description of Artificial Sequence: Synthetic oligonucleotide
cuggucaggucacuaaacu

SEQ ID NO: 1691 - RNA, 19 nt, Artificial Sequence
  Description of Artificial Sequence: Synthetic oligonucleotide
uggucaggucacuaaacua

SEQ ID NO: 1692 - RNA, 19 nt, Artificial Sequence
  Description of Artificial Sequence: Synthetic oligonucleotide
ggucaggucacuaaacuac

SEQ ID NO: 1693 - RNA, 19 nt, Artificial Sequence
  Description of Artificial Sequence: Synthetic oligonucleotide
gucaggucacuaaacuacu

SEQ ID NO: 1694 - RNA, 19 nt, Artificial Sequence
  Description of Artificial Sequence: Synthetic oligonucleotide
ucaggucacuaaacuacuu

SEQ ID NO: 1695 - RNA, 19 nt, Artificial Sequence
  Description of Artificial Sequence: Synthetic oligonucleotide
caggucacuaaacuacuug

SEQ ID NO: 1696 - RNA, 19 nt, Artificial Sequence
  Description of Artificial Sequence: Synthetic oligonucleotide
aggucacuaaacuacuugc

SEQ ID NO: 1697 - RNA, 19 nt, Artificial Sequence
  Description of Artificial Sequence: Synthetic oligonucleotide
ggucacuaaacuacuugcu

SEQ ID NO: 1698 - RNA, 19 nt, Artificial Sequence
  Description of Artificial Sequence: Synthetic oligonucleotide
gucacuaaacuacuugcug

SEQ ID NO: 1699 - RNA, 19 nt, Artificial Sequence
  Description of Artificial Sequence: Synthetic oligonucleotide
ucacuaaacuacuugcugu

SEQ ID NO: 1700 - RNA, 19 nt, Artificial Sequence
  Description of Artificial Sequence: Synthetic oligonucleotide
cacuaaacuacuugcugua

SEQ ID NO: 1701 - RNA, 19 nt, Artificial Sequence
  Description of Artificial Sequence: Synthetic oligonucleotide
acuaaacuacuugcuguau

SEQ ID NO: 1702 - RNA, 19 nt, Artificial Sequence
  Description of Artificial Sequence: Synthetic oligonucleotide
cuaaacuacuugcuguaug

SEQ ID NO: 1703 - RNA, 19 nt, Artificial Sequence
  Description of Artificial Sequence: Synthetic oligonucleotide
uaaacuacuugcuguaugu

SEQ ID NO: 1704 - RNA, 19 nt, Artificial Sequence
  Description of Artificial Sequence: Synthetic oligonucleotide
aaacuacuugcuguaugug

SEQ ID NO: 1705 - RNA, 19 nt, Artificial Sequence
  Description of Artificial Sequence: Synthetic oligonucleotide
aacuacuugcuguaugugu

SEQ ID NO: 1706 - RNA, 19 nt, Artificial Sequence
  Description of Artificial Sequence: Synthetic oligonucleotide
acuacuugcuguauguguc

SEQ ID NO: 1707 - RNA, 19 nt, Artificial Sequence
  Description of Artificial Sequence: Synthetic oligonucleotide
cuacuugcuguaugugucc

SEQ ID NO: 1708 - RNA, 19 nt, Artificial Sequence
  Description of Artificial Sequence: Synthetic oligonucleotide
uacuugcuguaugugucca

SEQ ID NO: 1709 - RNA, 19 nt, Artificial Sequence
  Description of Artificial Sequence: Synthetic oligonucleotide
acuugcuguauguguccaa

SEQ ID NO: 1710 - RNA, 19 nt, Artificial Sequence
  Description of Artificial Sequence: Synthetic oligonucleotide
cuugcuguauguguccaac

SEQ ID NO: 1711 - RNA, 19 nt, Artificial Sequence
  Description of Artificial Sequence: Synthetic oligonucleotide
uugcuguauguguccaacu

SEQ ID NO: 1712 - RNA, 19 nt, Artificial Sequence
  Description of Artificial Sequence: Synthetic oligonucleotide
ugcuguauguguccaacuu

SEQ ID NO: 1713 - RNA, 19 nt, Artificial Sequence
  Description of Artificial Sequence: Synthetic oligonucleotide
gcuguauguguccaacuuc

SEQ ID NO: 1714 - RNA, 19 nt, Artificial Sequence
  Description of Artificial Sequence: Synthetic oligonucleotide
cuguauguguccaacuucu

SEQ ID NO: 1715 - RNA, 19 nt, Artificial Sequence
  Description of Artificial Sequence: Synthetic oligonucleotide
uguauguguccaacuucuc

SEQ ID NO: 1716 - RNA, 19 nt, Artificial Sequence
  Description of Artificial Sequence: Synthetic oligonucleotide
guauguguccaacuucuca

SEQ ID NO: 1717 - RNA, 19 nt, Artificial Sequence
  Description of Artificial Sequence: Synthetic oligonucleotide
uauguguccaacuucucac

SEQ ID NO: 1718 - RNA, 19 nt, Artificial Sequence
  Description of Artificial Sequence: Synthetic oligonucleotide
auguguccaacuucucacu

SEQ ID NO: 1719 - RNA, 19 nt, Artificial Sequence
  Description of Artificial Sequence: Synthetic oligonucleotide
uguguccaacuucucacug

SEQ ID NO: 1720 - RNA, 19 nt, Artificial Sequence
  Description of Artificial Sequence: Synthetic oligonucleotide
guguccaacuucucacugg

SEQ ID NO: 1721 - RNA, 19 nt, Artificial Sequence
  Description of Artificial Sequence: Synthetic oligonucleotide
uguccaacuucucacuggg

SEQ ID NO: 1722 - RNA, 19 nt, Artificial Sequence
  Description of Artificial Sequence: Synthetic oligonucleotide
guccaacuucucacugggu

SEQ ID NO: 1723 - RNA, 19 nt, Artificial Sequence
  Description of Artificial Sequence: Synthetic oligonucleotide
uccaacuucucacugggug

SEQ ID NO: 1724 - RNA, 19 nt, Artificial Sequence
  Description of Artificial Sequence: Synthetic oligonucleotide
ccaacuucucacuggguga

SEQ ID NO: 1725 - RNA, 19 nt, Artificial Sequence
  Description of Artificial Sequence: Synthetic oligonucleotide
caacuucucacugggugac

SEQ ID NO: 1726 - RNA, 19 nt, Artificial Sequence
  Description of Artificial Sequence: Synthetic oligonucleotide
aacuucucacugggugaca

SEQ ID NO: 1727 - RNA, 19 nt, Artificial Sequence
  Description of Artificial Sequence: Synthetic oligonucleotide
acuucucacugggugacag

SEQ ID NO: 1728 - RNA, 19 nt, Artificial Sequence
  Description of Artificial Sequence: Synthetic oligonucleotide
cuucucacugggugacagu

SEQ ID NO: 1729 - RNA, 19 nt, Artificial Sequence
  Description of Artificial Sequence: Synthetic oligonucleotide
uucucacugggugacagug

SEQ ID NO: 1730 - RNA, 19 nt, Artificial Sequence
  Description of Artificial Sequence: Synthetic oligonucleotide
ucucacugggugacagugg

SEQ ID NO: 1731 - RNA, 19 nt, Artificial Sequence
  Description of Artificial Sequence: Synthetic oligonucleotide
cucacugggugacaguggg

SEQ ID NO: 1732 - RNA, 19 nt, Artificial Sequence
  Description of Artificial Sequence: Synthetic oligonucleotide
ucacugggugacagugggc

SEQ ID NO: 1733 - RNA, 19 nt, Artificial Sequence
  Description of Artificial Sequence: Synthetic oligonucleotide
cacugggugacagugggca

SEQ ID NO: 1734 - RNA, 19 nt, Artificial Sequence
  Description of Artificial Sequence: Synthetic oligonucleotide
acugggugacagugggcag

SEQ ID NO: 1735 - RNA, 19 nt, Artificial Sequence
  Description of Artificial Sequence: Synthetic oligonucleotide
cugggugacagugggcagc

SEQ ID NO: 1736 - RNA, 19 nt, Artificial Sequence
  Description of Artificial Sequence: Synthetic oligonucleotide
ugggugacagugggcagcc

SEQ ID NO: 1737 - RNA, 19 nt, Artificial Sequence
  Description of Artificial Sequence: Synthetic oligonucleotide
gggugacagugggcagccc

SEQ ID NO: 1738 - RNA, 19 nt, Artificial Sequence
  Description of Artificial Sequence: Synthetic oligonucleotide
ggugacagugggcagcccg

SEQ ID NO: 1739 - RNA, 19 nt, Artificial Sequence
  Description of Artificial Sequence: Synthetic oligonucleotide
gugacagugggcagcccgu

SEQ ID NO: 1740 - RNA, 19 nt, Artificial Sequence
  Description of Artificial Sequence: Synthetic oligonucleotide
ugacagugggcagcccgug

SEQ ID NO: 1741 - RNA, 19 nt, Artificial Sequence
  Description of Artificial Sequence: Synthetic oligonucleotide
gacagugggcagcccgugc

SEQ ID NO: 1742 - RNA, 19 nt, Artificial Sequence
  Description of Artificial Sequence: Synthetic oligonucleotide
acagugggcagcccgugca

SEQ ID NO: 1743 - RNA, 19 nt, Artificial Sequence
  Description of Artificial Sequence: Synthetic oligonucleotide
cagugggcagcccgugcag

SEQ ID NO: 1744 - RNA, 19 nt, Artificial Sequence
  Description of Artificial Sequence: Synthetic oligonucleotide
agugggcagcccgugcagc

SEQ ID NO: 1745 - RNA, 19 nt, Artificial Sequence
  Description of Artificial Sequence: Synthetic oligonucleotide
gugggcagcccgugcagcg

SEQ ID NO: 1746 - RNA, 19 nt, Artificial Sequence
  Description of Artificial Sequence: Synthetic oligonucleotide
ugggcagcccgugcagcgg

SEQ ID NO: 1747 - RNA, 19 nt, Artificial Sequence
  Description of Artificial Sequence: Synthetic oligonucleotide
gggcagcccgugcagcggg

SEQ ID NO: 1748 - RNA, 19 nt, Artificial Sequence
  Description of Artificial Sequence: Synthetic oligonucleotide
ggcagcccgugcagcggga

SEQ ID NO: 1749 - RNA, 19 nt, Artificial Sequence
  Description of Artificial Sequence: Synthetic oligonucleotide
gcagcccgugcagcgggau

SEQ ID NO: 1750 - RNA, 19 nt, Artificial Sequence
  Description of Artificial Sequence: Synthetic oligonucleotide
cagcccgugcagcgggaug

SEQ ID NO: 1751 - RNA, 19 nt, Artificial Sequence
  Description of Artificial Sequence: Synthetic oligonucleotide
agcccgugcagcgggaugu

SEQ ID NO: 1752 - RNA, 19 nt, Artificial Sequence
  Description of Artificial Sequence: Synthetic oligonucleotide
gcccgugcagcgggauguc

SEQ ID NO: 1753 - RNA, 19 nt, Artificial Sequence
  Description of Artificial Sequence: Synthetic oligonucleotide
cccgugcagcgggauguca

SEQ ID NO: 1754 - RNA, 19 nt, Artificial Sequence
  Description of Artificial Sequence: Synthetic oligonucleotide
ccgugcagcgggaugucag

SEQ ID NO: 1755 - RNA, 19 nt, Artificial Sequence
  Description of Artificial Sequence: Synthetic oligonucleotide
cgugcagcgggaugucagu

SEQ ID NO: 1756 - RNA, 19 nt, Artificial Sequence
  Description of Artificial Sequence: Synthetic oligonucleotide
gugcagcgggaugucaguc

SEQ ID NO: 1757 - RNA, 19 nt, Artificial Sequence
  Description of Artificial Sequence: Synthetic oligonucleotide
ugcagcgggaugucagucg

SEQ ID NO: 1758 - RNA, 19 nt, Artificial Sequence
  Description of Artificial Sequence: Synthetic oligonucleotide
gcagcgggaugucagucgu

SEQ ID NO: 1759 - RNA, 19 nt, Artificial Sequence
  Description of Artificial Sequence: Synthetic oligonucleotide
cagcgggaugucagucguc

SEQ ID NO: 1760 - RNA, 19 nt, Artificial Sequence
  Description of Artificial Sequence: Synthetic oligonucleotide
agcgggaugucagucgucu

SEQ ID NO: 1761 - RNA, 19 nt, Artificial Sequence
  Description of Artificial Sequence: Synthetic oligonucleotide
gcgggaugucagucgucuu

SEQ ID NO: 1762 - RNA, 19 nt, Artificial Sequence
  Description of Artificial Sequence: Synthetic oligonucleotide
cgggaugucagucgucuug

SEQ ID NO: 1763 - RNA, 19 nt, Artificial Sequence
  Description of Artificial Sequence: Synthetic oligonucleotide
gggaugucagucgucuugg

SEQ ID NO: 1764 - RNA, 19 nt, Artificial Sequence
  Description of Artificial Sequence: Synthetic oligonucleotide
ggaugucagucgucuuggg

SEQ ID NO: 1765 - RNA, 19 nt, Artificial Sequence
  Description of Artificial Sequence: Synthetic oligonucleotide
gaugucagucgucuugggg

SEQ ID NO: 1766 - RNA, 19 nt, Artificial Sequence
  Description of Artificial Sequence: Synthetic oligonucleotide
augucagucgucuugggga

SEQ ID NO: 1767 - RNA, 19 nt, Artificial Sequence
  Description of Artificial Sequence: Synthetic oligonucleotide
ugucagucgucuuggggac

SEQ ID NO: 1768 - RNA, 19 nt, Artificial Sequence
  Description of Artificial Sequence: Synthetic oligonucleotide
gucagucgucuuggggacc

SEQ ID NO: 1769 - RNA, 19 nt, Artificial Sequence
  Description of Artificial Sequence: Synthetic oligonucleotide
ucagucgucuuggggacca

SEQ ID NO: 1770 - RNA, 19 nt, Artificial Sequence
  Description of Artificial Sequence: Synthetic oligonucleotide
cagucgucuuggggaccac

SEQ ID NO: 1771 - RNA, 19 nt, Artificial Sequence
  Description of Artificial Sequence: Synthetic oligonucleotide
agucgucuuggggaccacc

SEQ ID NO: 1772 - RNA, 19 nt, Artificial Sequence
  Description of Artificial Sequence: Synthetic oligonucleotide
gucgucuuggggaccaccu

SEQ ID NO: 1773 - RNA, 19 nt, Artificial Sequence
  Description of Artificial Sequence: Synthetic oligonucleotide
ucgucuuggggaccaccua

SEQ ID NO: 1774 - RNA, 19 nt, Artificial Sequence
  Description of Artificial Sequence: Synthetic oligonucleotide
cgucuuggggaccaccuac

SEQ ID NO: 1775 - RNA, 19 nt, Artificial Sequence
  Description of Artificial Sequence: Synthetic oligonucleotide
gucuuggggaccaccuacu

SEQ ID NO: 1776 - RNA, 19 nt, Artificial Sequence
  Description of Artificial Sequence: Synthetic oligonucleotide
ucuuggggaccaccuacuc

SEQ ID NO: 1777 - RNA, 19 nt, Artificial Sequence
  Description of Artificial Sequence: Synthetic oligonucleotide
cuuggggaccaccuacucu

SEQ ID NO: 1778 - RNA, 19 nt, Artificial Sequence
  Description of Artificial Sequence: Synthetic oligonucleotide
uuggggaccaccuacucuu

SEQ ID NO: 1779 - RNA, 19 nt, Artificial Sequence
  Description of Artificial Sequence: Synthetic oligonucleotide
uggggaccaccuacucuuu

SEQ ID NO: 1780 - RNA, 19 nt, Artificial Sequence
  Description of Artificial Sequence: Synthetic oligonucleotide
ggggaccaccuacucuuug

SEQ ID NO: 1781 - RNA, 19 nt, Artificial Sequence
  Description of Artificial Sequence: Synthetic oligonucleotide
gggaccaccuacucuuugc

SEQ ID NO: 1782 - RNA, 19 nt, Artificial Sequence
  Description of Artificial Sequence: Synthetic oligonucleotide
ggaccaccuacucuuugcc

SEQ ID NO: 1783 - RNA, 19 nt, Artificial Sequence
  Description of Artificial Sequence: Synthetic oligonucleotide
gaccaccuacucuuugccu

SEQ ID NO: 1784 - RNA, 19 nt, Artificial Sequence
  Description of Artificial Sequence: Synthetic oligonucleotide
accaccuacucuuugccuc

SEQ ID NO: 1785 - RNA, 19 nt, Artificial Sequence
  Description of Artificial Sequence: Synthetic oligonucleotide
ccaccuacucuuugccucu

SEQ ID NO: 1786 - RNA, 19 nt, Artificial Sequence
  Description of Artificial Sequence: Synthetic oligonucleotide
caccuacucuuugccucug

SEQ ID NO: 1787 - RNA, 19 nt, Artificial Sequence
  Description of Artificial Sequence: Synthetic oligonucleotide
accuacucuuugccucugg

SEQ ID NO: 1788 - RNA, 19 nt, Artificial Sequence
  Description of Artificial Sequence: Synthetic oligonucleotide
ccuacucuuugccucuggg

SEQ ID NO: 1789 - RNA, 19 nt, Artificial Sequence
  Description of Artificial Sequence: Synthetic oligonucleotide
cuacucuuugccucugggg

SEQ ID NO: 1790 - RNA, 19 nt, Artificial Sequence
  Description of Artificial Sequence: Synthetic oligonucleotide
uacucuuugccucugggga

SEQ ID NO: 1791 - RNA, 19 nt, Artificial Sequence
  Description of Artificial Sequence: Synthetic oligonucleotide
acucuuugccucuggggac

SEQ ID NO: 1792 - RNA, 19 nt, Artificial Sequence
  Description of Artificial Sequence: Synthetic oligonucleotide
cucuuugccucuggggacc

SEQ ID NO: 1793 - RNA, 19 nt, Artificial Sequence
  Description of Artificial Sequence: Synthetic oligonucleotide
ucuuugccucuggggacca

SEQ ID NO: 1794 - RNA, 19 nt, Artificial Sequence
  Description of Artificial Sequence: Synthetic oligonucleotide
cuuugccucuggggaccag

SEQ ID NO: 1795 - RNA, 19 nt, Artificial Sequence
  Description of Artificial Sequence: Synthetic oligonucleotide
uuugccucuggggaccagg

SEQ ID NO: 1796 - RNA, 19 nt, Artificial Sequence
  Description of Artificial Sequence: Synthetic oligonucleotide
uugccucuggggaccaggu

SEQ ID NO: 1797 - RNA, 19 nt, Artificial Sequence
  Description of Artificial Sequence: Synthetic oligonucleotide
ugccucuggggaccagguu

SEQ ID NO: 1798 - RNA, 19 nt, Artificial Sequence
  Description of Artificial Sequence: Synthetic oligonucleotide
gccucuggggaccagguuu

SEQ ID NO: 1799 - RNA, 19 nt, Artificial Sequence
  Description of Artificial Sequence: Synthetic oligonucleotide
ccucuggggaccagguuuu

SEQ ID NO: 1800 - RNA, 19 nt, Artificial Sequence
  Description of Artificial Sequence: Synthetic oligonucleotide
cucuggggaccagguuuuc

SEQ ID NO: 1801 - RNA, 19 nt, Artificial Sequence
  Description of Artificial Sequence: Synthetic oligonucleotide
ucuggggaccagguuuucc

SEQ ID NO: 1802 - RNA, 19 nt, Artificial Sequence
  Description of Artificial Sequence: Synthetic oligonucleotide
cuggggaccagguuuucca

SEQ ID NO: 1803 - RNA, 19 nt, Artificial Sequence
  Description of Artificial Sequence: Synthetic oligonucleotide
uggggaccagguuuuccag

SEQ ID NO: 1804 - RNA, 19 nt, Artificial Sequence
  Description of Artificial Sequence: Synthetic oligonucleotide
ggggaccagguuuuccagg

SEQ ID NO: 1805 - RNA, 19 nt, Artificial Sequence
  Description of Artificial Sequence: Synthetic oligonucleotide
gggaccagguuuuccaggu

SEQ ID NO: 1806 - RNA, 19 nt, Artificial Sequence
  Description of Artificial Sequence: Synthetic oligonucleotide
ggaccagguuuuccaggua

SEQ ID NO: 1807 - RNA, 19 nt, Artificial Sequence
  Description of Artificial Sequence: Synthetic oligonucleotide
gaccagguuuuccagguac

SEQ ID NO: 1808 - RNA, 19 nt, Artificial Sequence
  Description of Artificial Sequence: Synthetic oligonucleotide
accagguuuuccagguacc

SEQ ID NO: 1809 - RNA, 19 nt, Artificial Sequence
  Description of Artificial Sequence: Synthetic oligonucleotide
ccagguuuuccagguaccu

SEQ ID NO: 1810 - RNA, 19 nt, Artificial Sequence
  Description of Artificial Sequence: Synthetic oligonucleotide
cagguuuuccagguaccua

SEQ ID NO: 1811 - RNA, 19 nt, Artificial Sequence
  Description of Artificial Sequence: Synthetic oligonucleotide
agguuuuccagguaccuau

SEQ ID NO: 1812 - RNA, 19 nt, Artificial Sequence
  Description of Artificial Sequence: Synthetic oligonucleotide
gguuuuccagguaccuauc

SEQ ID NO: 1813 - RNA, 19 nt, Artificial Sequence
  Description of Artificial Sequence: Synthetic oligonucleotide
guuuuccagguaccuaucc

SEQ ID NO: 1814 - RNA, 19 nt, Artificial Sequence
  Description of Artificial Sequence: Synthetic oligonucleotide
uuuuccagguaccuaucca

SEQ ID NO: 1815 - RNA, 19 nt, Artificial Sequence
  Description of Artificial Sequence: Synthetic oligonucleotide
uuuccagguaccuauccaa

SEQ ID NO: 1816 - RNA, 19 nt, Artificial Sequence
  Description of Artificial Sequence: Synthetic oligonucleotide
uuccagguaccuauccaag

SEQ ID NO: 1817 - RNA, 19 nt, Artificial Sequence
  Description of Artificial Sequence: Synthetic oligonucleotide
uccagguaccuauccaagg

SEQ ID NO: 1818 - RNA, 19 nt, Artificial Sequence
  Description of Artificial Sequence: Synthetic oligonucleotide
ccagguaccuauccaaggc

SEQ ID NO: 1819 - RNA, 19 nt, Artificial Sequence
  Description of Artificial Sequence: Synthetic oligonucleotide
cagguaccuauccaaggcc

SEQ ID NO: 1820 - RNA, 19 nt, Artificial Sequence
  Description of Artificial Sequence: Synthetic oligonucleotide
agguaccuauccaaggccc

SEQ ID NO: 1821 - RNA, 19 nt, Artificial Sequence
  Description of Artificial Sequence: Synthetic oligonucleotide
gguaccuauccaaggcccu

SEQ ID NO: 1822 - RNA, 19 nt, Artificial Sequence
  Description of Artificial Sequence: Synthetic oligonucleotide
guaccuauccaaggcccug

SEQ ID NO: 1823 - RNA, 19 nt, Artificial Sequence
  Description of Artificial Sequence: Synthetic oligonucleotide
uaccuauccaaggcccugg

SEQ ID NO: 1824 - RNA, 19 nt, Artificial Sequence
  Description of Artificial Sequence: Synthetic oligonucleotide
accuauccaaggcccuggc

SEQ ID NO: 1825 - RNA, 19 nt, Artificial Sequence
  Description of Artificial Sequence: Synthetic oligonucleotide
ccuauccaaggcccuggcu

SEQ ID NO: 1826 - RNA, 19 nt, Artificial Sequence
  Description of Artificial Sequence: Synthetic oligonucleotide
cuauccaaggcccuggcug

SEQ ID NO: 1827 - RNA, 19 nt, Artificial Sequence
  Description of Artificial Sequence: Synthetic oligonucleotide
uauccaaggcccuggcugc

SEQ ID NO: 1828 - RNA, 19 nt, Artificial Sequence
  Description of Artificial Sequence: Synthetic oligonucleotide
auccaaggcccuggcugcc

SEQ ID NO: 1829 - RNA, 19 nt, Artificial Sequence
  Description of Artificial Sequence: Synthetic oligonucleotide
uccaaggcccuggcugccg

SEQ ID NO: 1830 - RNA, 19 nt, Artificial Sequence
  Description of Artificial Sequence: Synthetic oligonucleotide
ccaaggcccuggcugccgc

SEQ ID NO: 1831 - RNA, 19 nt, Artificial Sequence
  Description of Artificial Sequence: Synthetic oligonucleotide
caaggcccuggcugccgcc

SEQ ID NO: 1832 - RNA, 19 nt, Artificial Sequence
  Description of Artificial Sequence: Synthetic oligonucleotide
aaggcccuggcugccgcca

SEQ ID NO: 1833 - RNA, 19 nt, Artificial Sequence
  Description of Artificial Sequence: Synthetic oligonucleotide
aggcccuggcugccgccac

SEQ ID NO: 1834 - RNA, 19 nt, Artificial Sequence
  Description of Artificial Sequence: Synthetic oligonucleotide
ggcccuggcugccgccacu

SEQ ID NO: 1835 - RNA, 19 nt, Artificial Sequence
  Description of Artificial Sequence: Synthetic oligonucleotide
gcccuggcugccgccacuu

SEQ ID NO: 1836 - RNA, 19 nt, Artificial Sequence
  Description of Artificial Sequence: Synthetic oligonucleotide
cccuggcugccgccacuuc

SEQ ID NO: 1837 - RNA, 19 nt, Artificial Sequence
  Description of Artificial Sequence: Synthetic oligonucleotide
ccuggcugccgccacuucc

SEQ ID NO: 1838 - RNA, 19 nt, Artificial Sequence
  Description of Artificial Sequence: Synthetic oligonucleotide
cuggcugccgccacuuccu

SEQ ID NO: 1839 - RNA, 19 nt, Artificial Sequence
  Description of Artificial Sequence: Synthetic oligonucleotide
uggcugccgccacuuccug

SEQ ID NO: 1840 - RNA, 19 nt, Artificial Sequence
  Description of Artificial Sequence: Synthetic oligonucleotide
ggcugccgccacuuccuga

SEQ ID NO: 1841 - RNA, 19 nt, Artificial Sequence
  Description of Artificial Sequence: Synthetic oligonucleotide
gcugccgccacuuccugac

SEQ ID NO: 1842 - RNA, 19 nt, Artificial Sequence
  Description of Artificial Sequence: Synthetic oligonucleotide
cugccgccacuuccugacc

SEQ ID NO: 1843 - RNA, 19 nt, Artificial Sequence
  Description of Artificial Sequence: Synthetic oligonucleotide
ugccgccacuuccugaccu

SEQ ID NO: 1844 - RNA, 19 nt, Artificial Sequence
  Description of Artificial Sequence: Synthetic oligonucleotide
gccgccacuuccugaccug

SEQ ID NO: 1845 - RNA, 19 nt, Artificial Sequence
  Description of Artificial Sequence: Synthetic oligonucleotide
ccgccacuuccugaccugu

SEQ ID NO: 1846 - RNA, 19 nt, Artificial Sequence
  Description of Artificial Sequence: Synthetic oligonucleotide
cgccacuuccugaccugug

SEQ ID NO: 1847 - RNA, 19 nt, Artificial Sequence
  Description of Artificial Sequence: Synthetic oligonucleotide
gccacuuccugaccugugg

SEQ ID NO: 1848 - RNA, 19 nt, Artificial Sequence
  Description of Artificial Sequence: Synthetic oligonucleotide
ccacuuccugaccuguggg

SEQ ID NO: 1849 - RNA, 19 nt, Artificial Sequence
  Description of Artificial Sequence: Synthetic oligonucleotide
cacuuccugaccugugggc

SEQ ID NO: 1850 - RNA, 19 nt, Artificial Sequence
  Description of Artificial Sequence: Synthetic oligonucleotide
acuuccugaccugugggcg

SEQ ID NO: 1851 - RNA, 19 nt, Artificial Sequence
  Description of Artificial Sequence: Synthetic oligonucleotide
cuuccugaccugugggcgu

SEQ ID NO: 1852 - RNA, 19 nt, Artificial Sequence
  Description of Artificial Sequence: Synthetic oligonucleotide
uuccugaccugugggcguu

SEQ ID NO: 1853 - RNA, 19 nt, Artificial Sequence
  Description of Artificial Sequence: Synthetic oligonucleotide
uccugaccugugggcguug

SEQ ID NO: 1854 - RNA, 19 nt, Artificial Sequence
  Description of Artificial Sequence: Synthetic oligonucleotide
ccugaccugugggcguugc

SEQ ID NO: 1855 - RNA, 19 nt, Artificial Sequence
  Description of Artificial Sequence: Synthetic oligonucleotide
cugaccugugggcguugcc

SEQ ID NO: 1856 - RNA, 19 nt, Artificial Sequence
  Description of Artificial Sequence: Synthetic oligonucleotide
ugaccugugggcguugccu

SEQ ID NO: 1857 - RNA, 19 nt, Artificial Sequence
  Description of Artificial Sequence: Synthetic oligonucleotide
gaccugugggcguugccua

SEQ ID NO: 1858 - RNA, 19 nt, Artificial Sequence
  Description of Artificial Sequence: Synthetic oligonucleotide
accugugggcguugccuaa

SEQ ID NO: 1859 - RNA, 19 nt, Artificial Sequence
  Description of Artificial Sequence: Synthetic oligonucleotide
ccugugggcguugccuaag

SEQ ID NO: 1860 - RNA, 19 nt, Artificial Sequence
  Description of Artificial Sequence: Synthetic oligonucleotide
cugugggcguugccuaagg

SEQ ID NO: 1861 - RNA, 19 nt, Artificial Sequence
  Description of Artificial Sequence: Synthetic oligonucleotide
ugugggcguugccuaaggg

SEQ ID NO: 1862 - RNA, 19 nt, Artificial Sequence
  Description of Artificial Sequence: Synthetic oligonucleotide
gugggcguugccuaagggc

SEQ ID NO: 1863 - RNA, 19 nt, Artificial Sequence
  Description of Artificial Sequence: Synthetic oligonucleotide
ugggcguugccuaagggca

SEQ ID NO: 1864 - RNA, 19 nt, Artificial Sequence
  Description of Artificial Sequence: Synthetic oligonucleotide
gggcguugccuaagggcau

SEQ ID NO: 1865 - RNA, 19 nt, Artificial Sequence
  Description of Artificial Sequence: Synthetic oligonucleotide
ggcguugccuaagggcaug

SEQ ID NO: 1866 - RNA, 19 nt, Artificial Sequence
  Description of Artificial Sequence: Synthetic oligonucleotide
gcguugccuaagggcaugg

SEQ ID NO: 1867 - RNA, 19 nt, Artificial Sequence
  Description of Artificial Sequence: Synthetic oligonucleotide
cguugccuaagggcauggc

SEQ ID NO: 1868 - RNA, 19 nt, Artificial Sequence
  Description of Artificial Sequence: Synthetic oligonucleotide
guugccuaagggcauggca

SEQ ID NO: 1869 - RNA, 19 nt, Artificial Sequence
  Description of Artificial Sequence: Synthetic oligonucleotide
uugccuaagggcauggcau

SEQ ID NO: 1870 - RNA, 19 nt, Artificial Sequence
  Description of Artificial Sequence: Synthetic oligonucleotide
ugccuaagggcauggcauu

SEQ ID NO: 1871 - RNA, 19 nt, Artificial Sequence
  Description of Artificial Sequence: Synthetic oligonucleotide
gccuaagggcauggcauuu

SEQ ID NO: 1872 - RNA, 19 nt, Artificial Sequence
  Description of Artificial Sequence: Synthetic oligonucleotide
ccuaagggcauggcauuuc

SEQ ID NO: 1873 - RNA, 19 nt, Artificial Sequence
  Description of Artificial Sequence: Synthetic oligonucleotide
cuaagggcauggcauuuca

SEQ ID NO: 1874 - RNA, 19 nt, Artificial Sequence
  Description of Artificial Sequence: Synthetic oligonucleotide
uaagggcauggcauuucau

SEQ ID NO: 1875 - RNA, 19 nt, Artificial Sequence
  Description of Artificial Sequence: Synthetic oligonucleotide
aagggcauggcauuucaug

SEQ ID NO: 1876 - RNA, 19 nt, Artificial Sequence
  Description of Artificial Sequence: Synthetic oligonucleotide
agggcauggcauuucaugg

SEQ ID NO: 1877 - RNA, 19 nt, Artificial Sequence
  Description of Artificial Sequence: Synthetic oligonucleotide
gggcauggcauuucauggg

SEQ ID NO: 1878 - RNA, 19 nt, Artificial Sequence
  Description of Artificial Sequence: Synthetic oligonucleotide
ggcauggcauuucaugggc

SEQ ID NO: 1879 - RNA, 19 nt, Artificial Sequence
  Description of Artificial Sequence: Synthetic oligonucleotide
gcauggcauuucaugggcu

SEQ ID NO: 1880 - RNA, 19 nt, Artificial Sequence
  Description of Artificial Sequence: Synthetic oligonucleotide
cauggcauuucaugggcug

SEQ ID NO: 1881 - RNA, 19 nt, Artificial Sequence
  Description of Artificial Sequence: Synthetic oligonucleotide
auggcauuucaugggcugu

SEQ ID NO: 1882 - RNA, 19 nt, Artificial Sequence
  Description of Artificial Sequence: Synthetic oligonucleotide
uggcauuucaugggcugug

SEQ ID NO: 1883 - RNA, 19 nt, Artificial Sequence
  Description of Artificial Sequence: Synthetic oligonucleotide
ggcauuucaugggcugugg

SEQ ID NO: 1884 - RNA, 19 nt, Artificial Sequence
  Description of Artificial Sequence: Synthetic oligonucleotide
gcauuucaugggcuguggc

SEQ ID NO: 1885 - RNA, 19 nt, Artificial Sequence
  Description of Artificial Sequence: Synthetic oligonucleotide
cauuucaugggcuguggcu

SEQ ID NO: 1886 - RNA, 19 nt, Artificial Sequence
  Description of Artificial Sequence: Synthetic oligonucleotide
auuucaugggcuguggcug

SEQ ID NO: 1887 - RNA, 19 nt, Artificial Sequence
  Description of Artificial Sequence: Synthetic oligonucleotide
uuucaugggcuguggcugg

SEQ ID NO: 1888 - RNA, 19 nt, Artificial Sequence
  Description of Artificial Sequence: Synthetic oligonucleotide
uucaugggcuguggcuggu

SEQ ID NO: 1889 - RNA, 19 nt, Artificial Sequence
  Description of Artificial Sequence: Synthetic oligonucleotide
ucaugggcuguggcuggug

SEQ ID NO: 1890 - RNA, 19 nt, Artificial Sequence
  Description of Artificial Sequence: Synthetic oligonucleotide
caugggcuguggcuggugu

SEQ ID NO: 1891 - RNA, 19 nt, Artificial Sequence
  Description of Artificial Sequence: Synthetic oligonucleotide
augggcuguggcuggugug

SEQ ID NO: 1892 - RNA, 19 nt, Artificial Sequence
  Description of Artificial Sequence: Synthetic oligonucleotide
ugggcuguggcuggugugg

SEQ ID NO: 1893 - RNA, 19 nt, Artificial Sequence
  Description of Artificial Sequence: Synthetic oligonucleotide
gggcuguggcugguguggg

SEQ ID NO: 1894 - RNA, 19 nt, Artificial Sequence
  Description of Artificial Sequence: Synthetic oligonucleotide
ggcuguggcugguguggga

SEQ ID NO: 1895 - RNA, 19 nt, Artificial Sequence
  Description of Artificial Sequence: Synthetic oligonucleotide
gcuguggcuggugugggaa

SEQ ID NO: 1896 - RNA, 19 nt, Artificial Sequence
  Description of Artificial Sequence: Synthetic oligonucleotide
cuguggcuggugugggaac

SEQ ID NO: 1897 - RNA, 19 nt, Artificial Sequence
  Description of Artificial Sequence: Synthetic oligonucleotide
uguggcuggugugggaaca

SEQ ID NO: 1898 - RNA, 19 nt, Artificial Sequence
  Description of Artificial Sequence: Synthetic oligonucleotide
guggcuggugugggaacau

SEQ ID NO: 1899 - RNA, 19 nt, Artificial Sequence
  Description of Artificial Sequence: Synthetic oligonucleotide
uggcuggugugggaacaug

SEQ ID NO: 1900 - RNA, 19 nt, Artificial Sequence
  Description of Artificial Sequence: Synthetic oligonucleotide
ggcuggugugggaacaugu

SEQ ID NO: 1901 - RNA, 19 nt, Artificial Sequence
  Description of Artificial Sequence: Synthetic oligonucleotide
gcuggugugggaacaugug

SEQ ID NO: 1902 - RNA, 19 nt, Artificial Sequence
  Description of Artificial Sequence: Synthetic oligonucleotide
cuggugugggaacaugugc

SEQ ID NO: 1903 - RNA, 19 nt, Artificial Sequence
  Description of Artificial Sequence: Synthetic oligonucleotide
uggugugggaacaugugcg

SEQ ID NO: 1904 - RNA, 19 nt, Artificial Sequence
  Description of Artificial Sequence: Synthetic oligonucleotide
ggugugggaacaugugcgg

SEQ ID NO: 1905 - RNA, 19 nt, Artificial Sequence
  Description of Artificial Sequence: Synthetic oligonucleotide
gugugggaacaugugcggc

SEQ ID NO: 1906 - RNA, 19 nt, Artificial Sequence
  Description of Artificial Sequence: Synthetic oligonucleotide
ugugggaacaugugcggcc

SEQ ID NO: 1907 - RNA, 19 nt, Artificial Sequence
  Description of Artificial Sequence: Synthetic oligonucleotide
gugggaacaugugcggcca

SEQ ID NO: 1908 - RNA, 19 nt, Artificial Sequence
  Description of Artificial Sequence: Synthetic oligonucleotide
ugggaacaugugcggccag

SEQ ID NO: 1909 - RNA, 19 nt, Artificial Sequence
  Description of Artificial Sequence: Synthetic oligonucleotide
gggaacaugugcggccagc

SEQ ID NO: 1910 - RNA, 19 nt, Artificial Sequence
  Description of Artificial Sequence: Synthetic oligonucleotide
ggaacaugugcggccagca

SEQ ID NO: 1911 - RNA, 19 nt, Artificial Sequence
  Description of Artificial Sequence: Synthetic oligonucleotide
gaacaugugcggccagcag

SEQ ID NO: 1912 - RNA, 19 nt, Artificial Sequence
  Description of Artificial Sequence: Synthetic oligonucleotide
aacaugugcggccagcaga

SEQ ID NO: 1913 - RNA, 19 nt, Artificial Sequence
  Description of Artificial Sequence: Synthetic oligonucleotide
acaugugcggccagcagaa

SEQ ID NO: 1914 - RNA, 19 nt, Artificial Sequence
  Description of Artificial Sequence: Synthetic oligonucleotide
caugugcggccagcagaag

SEQ ID NO: 1915 - RNA, 19 nt, Artificial Sequence
  Description of Artificial Sequence: Synthetic oligonucleotide
augugcggccagcagaagg

SEQ ID NO: 1916 - RNA, 19 nt, Artificial Sequence
  Description of Artificial Sequence: Synthetic oligonucleotide
ugugcggccagcagaagga

SEQ ID NO: 1917 - RNA, 19 nt, Artificial Sequence
  Description of Artificial Sequence: Synthetic oligonucleotide
gugcggccagcagaaggag

SEQ ID NO: 1918 - RNA, 19 nt, Artificial Sequence
  Description of Artificial Sequence: Synthetic oligonucleotide
ugcggccagcagaaggagu

SEQ ID NO: 1919 - RNA, 19 nt, Artificial Sequence
  Description of Artificial Sequence: Synthetic oligonucleotide
gcggccagcagaaggagug

SEQ ID NO: 1920 - RNA, 19 nt, Artificial Sequence
  Description of Artificial Sequence: Synthetic oligonucleotide
cggccagcagaaggagugu

SEQ ID NO: 1921 - RNA, 19 nt, Artificial Sequence
  Description of Artificial Sequence: Synthetic oligonucleotide
ggccagcagaaggaguguc

SEQ ID NO: 1922 - RNA, 19 nt, Artificial Sequence
  Description of Artificial Sequence: Synthetic oligonucleotide
gccagcagaaggagugucc

SEQ ID NO: 1923 - RNA, 19 nt, Artificial Sequence
  Description of Artificial Sequence: Synthetic oligonucleotide
ccagcagaaggaguguccu

SEQ ID NO: 1924 - RNA, 19 nt, Artificial Sequence
  Description of Artificial Sequence: Synthetic oligonucleotide
cagcagaaggaguguccug

SEQ ID NO: 1925 - RNA, 19 nt, Artificial Sequence
  Description of Artificial Sequence: Synthetic oligonucleotide
agcagaaggaguguccugg

SEQ ID NO: 1926 - RNA, 19 nt, Artificial Sequence
  Description of Artificial Sequence: Synthetic oligonucleotide
gcagaaggaguguccuggc

SEQ ID NO: 1927 - RNA, 19 nt, Artificial Sequence
  Description of Artificial Sequence: Synthetic oligonucleotide
cagaaggaguguccuggcu

SEQ ID NO: 1928 - RNA, 19 nt, Artificial Sequence
  Description of Artificial Sequence: Synthetic oligonucleotide
agaaggaguguccuggcuc

SEQ ID NO: 1929 - RNA, 19 nt, Artificial Sequence
  Description of Artificial Sequence: Synthetic oligonucleotide
gaaggaguguccuggcucc

SEQ ID NO: 1930 - RNA, 19 nt, Artificial Sequence
  Description of Artificial Sequence: Synthetic oligonucleotide
aaggaguguccuggcuccu

SEQ ID NO: 1931 - RNA, 19 nt, Artificial Sequence
  Description of Artificial Sequence: Synthetic oligonucleotide
aggaguguccuggcuccug

SEQ ID NO: 1932 - RNA, 19 nt, Artificial Sequence
  Description of Artificial Sequence: Synthetic oligonucleotide
ggaguguccuggcuccugg

SEQ ID NO: 1933 - RNA, 19 nt, Artificial Sequence
  Description of Artificial Sequence: Synthetic oligonucleotide
gaguguccuggcuccuggc

SEQ ID NO: 1934 - RNA, 19 nt, Artificial Sequence
  Description of Artificial Sequence: Synthetic oligonucleotide
aguguccuggcuccuggca

SEQ ID NO: 1935 - RNA, 19 nt, Artificial Sequence
  Description of Artificial Sequence: Synthetic oligonucleotide
guguccuggcuccuggcaa

SEQ ID NO: 1936 - RNA, 19 nt, Artificial Sequence
  Description of Artificial Sequence: Synthetic oligonucleotide
uguccuggcuccuggcaac

SEQ ID NO: 1937 - RNA, 19 nt, Artificial Sequence
  Description of Artificial Sequence: Synthetic oligonucleotide
guccuggcuccuggcaaca

SEQ ID NO: 1938 - RNA, 19 nt, Artificial Sequence
  Description of Artificial Sequence: Synthetic oligonucleotide
uccuggcuccuggcaacag

SEQ ID NO: 1939 - RNA, 19 nt, Artificial Sequence
  Description of Artificial Sequence: Synthetic oligonucleotide
ccuggcuccuggcaacagg

SEQ ID NO: 1940 - RNA, 19 nt, Artificial Sequence
  Description of Artificial Sequence: Synthetic oligonucleotide
cuggcuccuggcaacagga

SEQ ID NO: 1941 - RNA, 19 nt, Artificial Sequence
  Description of Artificial Sequence: Synthetic oligonucleotide
uggcuccuggcaacaggac

SEQ ID NO: 1942 - RNA, 19 nt, Artificial Sequence
  Description of Artificial Sequence: Synthetic oligonucleotide
ggcuccuggcaacaggacc

SEQ ID NO: 1943 - RNA, 19 nt, Artificial Sequence
  Description of Artificial Sequence: Synthetic oligonucleotide
gcuccuggcaacaggacca

SEQ ID NO: 1944 - RNA, 19 nt, Artificial Sequence
  Description of Artificial Sequence: Synthetic oligonucleotide
cuccuggcaacaggaccac

SEQ ID NO: 1945 - RNA, 19 nt, Artificial Sequence
  Description of Artificial Sequence: Synthetic oligonucleotide
uccuggcaacaggaccacu

SEQ ID NO: 1946 - RNA, 19 nt, Artificial Sequence
  Description of Artificial Sequence: Synthetic oligonucleotide
ccuggcaacaggaccacug

SEQ ID NO: 1947 - RNA, 19 nt, Artificial Sequence
  Description of Artificial Sequence: Synthetic oligonucleotide
cuggcaacaggaccacugc

SEQ ID NO: 1948 - RNA, 19 nt, Artificial Sequence
  Description of Artificial Sequence: Synthetic oligonucleotide
uggcaacaggaccacugcc

SEQ ID NO: 1949 - RNA, 19 nt, Artificial Sequence
  Description of Artificial Sequence: Synthetic oligonucleotide
ggcaacaggaccacugccc

SEQ ID NO: 1950 - RNA, 19 nt, Artificial Sequence
  Description of Artificial Sequence: Synthetic oligonucleotide
gcaacaggaccacugccca

SEQ ID NO: 1951 - RNA, 19 nt, Artificial Sequence
  Description of Artificial Sequence: Synthetic oligonucleotide
caacaggaccacugcccac

SEQ ID NO: 1952 - RNA, 19 nt, Artificial Sequence
  Description of Artificial Sequence: Synthetic oligonucleotide
aacaggaccacugcccacc

SEQ ID NO: 1953 - RNA, 19 nt, Artificial Sequence
  Description of Artificial Sequence: Synthetic oligonucleotide
acaggaccacugcccaccu

SEQ ID NO: 1954 - RNA, 19 nt, Artificial Sequence
  Description of Artificial Sequence: Synthetic oligonucleotide
caggaccacugcccaccua

SEQ ID NO: 1955 - RNA, 19 nt, Artificial Sequence
  Description of Artificial Sequence: Synthetic oligonucleotide
aggaccacugcccaccuaa

SEQ ID NO: 1956 - RNA, 19 nt, Artificial Sequence
  Description of Artificial Sequence: Synthetic oligonucleotide
ggaccacugcccaccuaag

SEQ ID NO: 1957 - RNA, 19 nt, Artificial Sequence
  Description of Artificial Sequence: Synthetic oligonucleotide
gaccacugcccaccuaagc

SEQ ID NO: 1958 - RNA, 19 nt, Artificial Sequence
  Description of Artificial Sequence: Synthetic oligonucleotide
accacugcccaccuaagcu

SEQ ID NO: 1959 - RNA, 19 nt, Artificial Sequence
  Description of Artificial Sequence: Synthetic oligonucleotide
ccacugcccaccuaagcuu

SEQ ID NO: 1960 - RNA, 19 nt, Artificial Sequence
  Description of Artificial Sequence: Synthetic oligonucleotide
cacugcccaccuaagcuua

SEQ ID NO: 1961 - RNA, 19 nt, Artificial Sequence
  Description of Artificial Sequence: Synthetic oligonucleotide
acugcccaccuaagcuuac

SEQ ID NO: 1962 - RNA, 19 nt, Artificial Sequence
  Description of Artificial Sequence: Synthetic oligonucleotide
cugcccaccuaagcuuacu

SEQ ID NO: 1963 - RNA, 19 nt, Artificial Sequence
  Description of Artificial Sequence: Synthetic oligonucleotide
ugcccaccuaagcuuacug

SEQ ID NO: 1964 - RNA, 19 nt, Artificial Sequence
  Description of Artificial Sequence: Synthetic oligonucleotide
gcccaccuaagcuuacuga

SEQ ID NO: 1965 - RNA, 19 nt, Artificial Sequence
  Description of Artificial Sequence: Synthetic oligonucleotide
cccaccuaagcuuacugag

SEQ ID NO: 1966 - RNA, 19 nt, Artificial Sequence
  Description of Artificial Sequence: Synthetic oligonucleotide
ccaccuaagcuuacugagu

SEQ ID NO: 1967 - RNA, 19 nt, Artificial Sequence
  Description of Artificial Sequence: Synthetic oligonucleotide
caccuaagcuuacugaguu

SEQ ID NO: 1968 - RNA, 19 nt, Artificial Sequence
  Description of Artificial Sequence: Synthetic oligonucleotide
accuaagcuuacugaguuc

SEQ ID NO: 1969 - RNA, 19 nt, Artificial Sequence
  Description of Artificial Sequence: Synthetic oligonucleotide
ccuaagcuuacugaguucc

SEQ ID NO: 1970 - RNA, 19 nt, Artificial Sequence
  Description of Artificial Sequence: Synthetic oligonucleotide
cuaagcuuacugaguucca

SEQ ID NO: 1971 - RNA, 19 nt, Artificial Sequence
  Description of Artificial Sequence: Synthetic oligonucleotide
uaagcuuacugaguuccac

SEQ ID NO: 1972 - RNA, 19 nt, Artificial Sequence
  Description of Artificial Sequence: Synthetic oligonucleotide
aagcuuacugaguuccacc

SEQ ID NO: 1973 - RNA, 19 nt, Artificial Sequence
  Description of Artificial Sequence: Synthetic oligonucleotide
agcuuacugaguuccaccc

SEQ ID NO: 1974 - RNA, 19 nt, Artificial Sequence
  Description of Artificial Sequence: Synthetic oligonucleotide
gcuuacugaguuccacccc

SEQ ID NO: 1975 - RNA, 19 nt, Artificial Sequence
  Description of Artificial Sequence: Synthetic oligonucleotide
cuuacugaguuccaccccc

SEQ ID NO: 1976 - RNA, 19 nt, Artificial Sequence
  Description of Artificial Sequence: Synthetic oligonucleotide
uuacugaguuccaccccca

SEQ ID NO: 1977 - RNA, 19 nt, Artificial Sequence
  Description of Artificial Sequence: Synthetic oligonucleotide
uacugaguuccacccccac

SEQ ID NO: 1978 - RNA, 19 nt, Artificial Sequence
  Description of Artificial Sequence: Synthetic oligonucleotide
acugaguuccacccccaca

SEQ ID NO: 1979 - RNA, 19 nt, Artificial Sequence
  Description of Artificial Sequence: Synthetic oligonucleotide
cugaguuccacccccacag

SEQ ID NO: 1980 - RNA, 19 nt, Artificial Sequence
  Description of Artificial Sequence: Synthetic oligonucleotide
ugaguuccacccccacagu

SEQ ID NO: 1981 - RNA, 19 nt, Artificial Sequence
  Description of Artificial Sequence: Synthetic oligonucleotide
gaguuccacccccacagug

SEQ ID NO: 1982 - RNA, 19 nt, Artificial Sequence
  Description of Artificial Sequence: Synthetic oligonucleotide
aguuccacccccacagugg

SEQ ID NO: 1983 - RNA, 19 nt, Artificial Sequence
  Description of Artificial Sequence: Synthetic oligonucleotide
guuccacccccacagugga

SEQ ID NO: 1984 - RNA, 19 nt, Artificial Sequence
  Description of Artificial Sequence: Synthetic oligonucleotide
uuccacccccacaguggac

SEQ ID NO: 1985 - RNA, 19 nt, Artificial Sequence
  Description of Artificial Sequence: Synthetic oligonucleotide
uccacccccacaguggacc

SEQ ID NO: 1986 - RNA, 19 nt, Artificial Sequence
  Description of Artificial Sequence: Synthetic oligonucleotide
ccacccccacaguggaccu

SEQ ID NO: 1987 - RNA, 19 nt, Artificial Sequence
  Description of Artificial Sequence: Synthetic oligonucleotide
cacccccacaguggaccuc

SEQ ID NO: 1988 - RNA, 19 nt, Artificial Sequence
  Description of Artificial Sequence: Synthetic oligonucleotide
acccccacaguggaccucu

SEQ ID NO: 1989 - RNA, 19 nt, Artificial Sequence
  Description of Artificial Sequence: Synthetic oligonucleotide
cccccacaguggaccucua

SEQ ID NO: 1990 - RNA, 19 nt, Artificial Sequence
  Description of Artificial Sequence: Synthetic oligonucleotide
ccccacaguggaccucuaa

SEQ ID NO: 1991 - RNA, 19 nt, Artificial Sequence
  Description of Artificial Sequence: Synthetic oligonucleotide
cccacaguggaccucuaag

SEQ ID NO: 1992 - RNA, 19 nt, Artificial Sequence
  Description of Artificial Sequence: Synthetic oligonucleotide
ccacaguggaccucuaagg

SEQ ID NO: 1993 - RNA, 19 nt, Artificial Sequence
  Description of Artificial Sequence: Synthetic oligonucleotide
cacaguggaccucuaaggg

SEQ ID NO: 1994 - RNA, 19 nt, Artificial Sequence
  Description of Artificial Sequence: Synthetic oligonucleotide
acaguggaccucuaagggg

SEQ ID NO: 1995 - RNA, 19 nt, Artificial Sequence
  Description of Artificial Sequence: Synthetic oligonucleotide
caguggaccucuaaggggc

SEQ ID NO: 1996 - RNA, 19 nt, Artificial Sequence
  Description of Artificial Sequence: Synthetic oligonucleotide
aguggaccucuaaggggca

SEQ ID NO: 1997 - RNA, 19 nt, Artificial Sequence
  Description of Artificial Sequence: Synthetic oligonucleotide
guggaccucuaaggggcag

SEQ ID NO: 1998 - RNA, 19 nt, Artificial Sequence
  Description of Artificial Sequence: Synthetic oligonucleotide
uggaccucuaaggggcagu

SEQ ID NO: 1999 - RNA, 19 nt, Artificial Sequence
  Description of Artificial Sequence: Synthetic oligonucleotide
ggaccucuaaggggcagua

SEQ ID NO: 2000 - RNA, 19 nt, Artificial Sequence
  Description of Artificial Sequence: Synthetic oligonucleotide
gaccucuaaggggcaguac

SEQ ID NO: 2001 - RNA, 19 nt, Artificial Sequence
  Description of Artificial Sequence: Synthetic oligonucleotide
accucuaaggggcaguaca

SEQ ID NO: 2002 - RNA, 19 nt, Artificial Sequence
  Description of Artificial Sequence: Synthetic oligonucleotide
ccucuaaggggcaguacaa

SEQ ID NO: 2003 - RNA, 19 nt, Artificial Sequence
  Description of Artificial Sequence: Synthetic oligonucleotide
cucuaaggggcaguacaag

SEQ ID NO: 2004 - RNA, 19 nt, Artificial Sequence
  Description of Artificial Sequence: Synthetic oligonucleotide
ucuaaggggcaguacaagg

SEQ ID NO: 2005 - RNA, 19 nt, Artificial Sequence
  Description of Artificial Sequence: Synthetic oligonucleotide
cuaaggggcaguacaaggc

SEQ ID NO: 2006 - RNA, 19 nt, Artificial Sequence
  Description of Artificial Sequence: Synthetic oligonucleotide
uaaggggcaguacaaggcu

SEQ ID NO: 2007 - RNA, 19 nt, Artificial Sequence
  Description of Artificial Sequence: Synthetic oligonucleotide
aaggggcaguacaaggcug

SEQ ID NO: 2008 - RNA, 19 nt, Artificial Sequence
  Description of Artificial Sequence: Synthetic oligonucleotide
aggggcaguacaaggcuga

SEQ ID NO: 2009 - RNA, 19 nt, Artificial Sequence
  Description of Artificial Sequence: Synthetic oligonucleotide
ggggcaguacaaggcugac

SEQ ID NO: 2010 - RNA, 19 nt, Artificial Sequence
  Description of Artificial Sequence: Synthetic oligonucleotide
gggcaguacaaggcugacc

SEQ ID NO: 2011 - RNA, 19 nt, Artificial Sequence
  Description of Artificial Sequence: Synthetic oligonucleotide
ggcaguacaaggcugaccc

SEQ ID NO: 2012 - RNA, 19 nt, Artificial Sequence
  Description of Artificial Sequence: Synthetic oligonucleotide
gcaguacaaggcugacccu

SEQ ID NO: 2013 - RNA, 19 nt, Artificial Sequence
  Description of Artificial Sequence: Synthetic oligonucleotide
caguacaaggcugacccug

SEQ ID NO: 2014 - RNA, 19 nt, Artificial Sequence
  Description of Artificial Sequence: Synthetic oligonucleotide
aguacaaggcugacccugu

SEQ ID NO: 2015 - RNA, 19 nt, Artificial Sequence
  Description of Artificial Sequence: Synthetic oligonucleotide
guacaaggcugacccugug

SEQ ID NO: 2016 - RNA, 19 nt, Artificial Sequence
  Description of Artificial Sequence: Synthetic oligonucleotide
uacaaggcugacccugugu

SEQ ID NO: 2017 - RNA, 19 nt, Artificial Sequence
  Description of Artificial Sequence: Synthetic oligonucleotide
acaaggcugacccugugug

SEQ ID NO: 2018 - RNA, 19 nt, Artificial Sequence
  Description of Artificial Sequence: Synthetic oligonucleotide
caaggcugacccugugugg

SEQ ID NO: 2019 - RNA, 19 nt, Artificial Sequence
  Description of Artificial Sequence: Synthetic oligonucleotide
aaggcugacccuguguggc

SEQ ID NO: 2020 - RNA, 19 nt, Artificial Sequence
  Description of Artificial Sequence: Synthetic oligonucleotide
aggcugacccuguguggcu

SEQ ID NO: 2021 - RNA, 19 nt, Artificial Sequence
  Description of Artificial Sequence: Synthetic oligonucleotide
ggcugacccuguguggcuc

SEQ ID NO: 2022 - RNA, 19 nt, Artificial Sequence
  Description of Artificial Sequence: Synthetic oligonucleotide
gcugacccuguguggcucc

SEQ ID NO: 2023 - RNA, 19 nt, Artificial Sequence
  Description of Artificial Sequence: Synthetic oligonucleotide
cugacccuguguggcucca

SEQ ID NO: 2024 - RNA, 19 nt, Artificial Sequence
  Description of Artificial Sequence: Synthetic oligonucleotide
ugacccuguguggcuccaa

SEQ ID NO: 2025 - RNA, 19 nt, Artificial Sequence
  Description of Artificial Sequence: Synthetic oligonucleotide
gacccuguguggcuccaac

SEQ ID NO: 2026 - RNA, 19 nt, Artificial Sequence
  Description of Artificial Sequence: Synthetic oligonucleotide
acccuguguggcuccaacu

SEQ ID NO: 2027 - RNA, 19 nt, Artificial Sequence
  Description of Artificial Sequence: Synthetic oligonucleotide
cccuguguggcuccaacuu

SEQ ID NO: 2028 - RNA, 19 nt, Artificial Sequence
  Description of Artificial Sequence: Synthetic oligonucleotide
ccuguguggcuccaacuuc

SEQ ID NO: 2029 - RNA, 19 nt, Artificial Sequence
  Description of Artificial Sequence: Synthetic oligonucleotide
cuguguggcuccaacuucu

SEQ ID NO: 2030 - RNA, 19 nt, Artificial Sequence
  Description of Artificial Sequence: Synthetic oligonucleotide
uguguggcuccaacuucua

SEQ ID NO: 2031 - RNA, 19 nt, Artificial Sequence
  Description of Artificial Sequence: Synthetic oligonucleotide
guguggcuccaacuucuac

SEQ ID NO: 2032 - RNA, 19 nt, Artificial Sequence
  Description of Artificial Sequence: Synthetic oligonucleotide
uguggcuccaacuucuacc

SEQ ID NO: 2033 - RNA, 19 nt, Artificial Sequence
  Description of Artificial Sequence: Synthetic oligonucleotide
guggcuccaacuucuaccu

SEQ ID NO: 2034 - RNA, 19 nt, Artificial Sequence
  Description of Artificial Sequence: Synthetic oligonucleotide
uggcuccaacuucuaccuu

SEQ ID NO: 2035 - RNA, 19 nt, Artificial Sequence
  Description of Artificial Sequence: Synthetic oligonucleotide
ggcuccaacuucuaccuuc

SEQ ID NO: 2036 - RNA, 19 nt, Artificial Sequence
  Description of Artificial Sequence: Synthetic oligonucleotide
gcuccaacuucuaccuuca

SEQ ID NO: 2037 - RNA, 19 nt, Artificial Sequence
  Description of Artificial Sequence: Synthetic oligonucleotide
cuccaacuucuaccuucac

SEQ ID NO: 2038 - RNA, 19 nt, Artificial Sequence
  Description of Artificial Sequence: Synthetic oligonucleotide
uccaacuucuaccuucacc

SEQ ID NO: 2039 - RNA, 19 nt, Artificial Sequence
  Description of Artificial Sequence: Synthetic oligonucleotide
ccaacuucuaccuucaccc

SEQ ID NO: 2040 - RNA, 19 nt, Artificial Sequence
  Description of Artificial Sequence: Synthetic oligonucleotide
caacuucuaccuucacccu

SEQ ID NO: 2041 - RNA, 19 nt, Artificial Sequence
  Description of Artificial Sequence: Synthetic oligonucleotide
aacuucuaccuucacccuu

SEQ ID NO: 2042 - RNA, 19 nt, Artificial Sequence
  Description of Artificial Sequence: Synthetic oligonucleotide
acuucuaccuucacccuuc

SEQ ID NO: 2043 - RNA, 19 nt, Artificial Sequence
  Description of Artificial Sequence: Synthetic oligonucleotide
cuucuaccuucacccuucu

SEQ ID NO: 2044 - RNA, 19 nt, Artificial Sequence
  Description of Artificial Sequence: Synthetic oligonucleotide
uucuaccuucacccuucug

SEQ ID NO: 2045 - RNA, 19 nt, Artificial Sequence
  Description of Artificial Sequence: Synthetic oligonucleotide
ucuaccuucacccuucugg

SEQ ID NO: 2046 - RNA, 19 nt, Artificial Sequence
  Description of Artificial Sequence: Synthetic oligonucleotide
cuaccuucacccuucuggu

SEQ ID NO: 2047 - RNA, 19 nt, Artificial Sequence
  Description of Artificial Sequence: Synthetic oligonucleotide
uaccuucacccuucugguc

SEQ ID NO: 2048 - RNA, 19 nt, Artificial Sequence
  Description of Artificial Sequence: Synthetic oligonucleotide
accuucacccuucuggucu

SEQ ID NO: 2049 - RNA, 19 nt, Artificial Sequence
  Description of Artificial Sequence: Synthetic oligonucleotide
ccuucacccuucuggucug

SEQ ID NO: 2050 - RNA, 19 nt, Artificial Sequence
  Description of Artificial Sequence: Synthetic oligonucleotide
cuucacccuucuggucugg

SEQ ID NO: 2051 - RNA, 19 nt, Artificial Sequence
  Description of Artificial Sequence: Synthetic oligonucleotide
uucacccuucuggucuggu

SEQ ID NO: 2052 - RNA, 19 nt, Artificial Sequence
  Description of Artificial Sequence: Synthetic oligonucleotide
ucacccuucuggucuggug

SEQ ID NO: 2053 - RNA, 19 nt, Artificial Sequence
  Description of Artificial Sequence: Synthetic oligonucleotide
cacccuucuggucuggugc

SEQ ID NO: 2054 - RNA, 19 nt, Artificial Sequence
  Description of Artificial Sequence: Synthetic oligonucleotide
acccuucuggucuggugcc

SEQ ID NO: 2055 - RNA, 19 nt, Artificial Sequence
  Description of Artificial Sequence: Synthetic oligonucleotide
cccuucuggucuggugccu

SEQ ID NO: 2056 - RNA, 19 nt, Artificial Sequence
  Description of Artificial Sequence: Synthetic oligonucleotide
ccuucuggucuggugccug

SEQ ID NO: 2057 - RNA, 19 nt, Artificial Sequence
  Description of Artificial Sequence: Synthetic oligonucleotide
cuucuggucuggugccuga

SEQ ID NO: 2058 - RNA, 19 nt, Artificial Sequence
  Description of Artificial Sequence: Synthetic oligonucleotide
uucuggucuggugccugag

SEQ ID NO: 2059 - RNA, 19 nt, Artificial Sequence
  Description of Artificial Sequence: Synthetic oligonucleotide
ucuggucuggugccugagg

SEQ ID NO: 2060 - RNA, 19 nt, Artificial Sequence
  Description of Artificial Sequence: Synthetic oligonucleotide
cuggucuggugccugaggg

SEQ ID NO: 2061 - RNA, 19 nt, Artificial Sequence
  Description of Artificial Sequence: Synthetic oligonucleotide
uggucuggugccugaggga

SEQ ID NO: 2062 - RNA, 19 nt, Artificial Sequence
  Description of Artificial Sequence: Synthetic oligonucleotide
ggucuggugccugagggaa

SEQ ID NO: 2063 - RNA, 19 nt, Artificial Sequence
  Description of Artificial Sequence: Synthetic oligonucleotide
gucuggugccugagggaac

SEQ ID NO: 2064 - RNA, 19 nt, Artificial Sequence
  Description of Artificial Sequence: Synthetic oligonucleotide
ucuggugccugagggaacc

SEQ ID NO: 2065 - RNA, 19 nt, Artificial Sequence
  Description of Artificial Sequence: Synthetic oligonucleotide
cuggugccugagggaaccc

SEQ ID NO: 2066 - RNA, 19 nt, Artificial Sequence
  Description of Artificial Sequence: Synthetic oligonucleotide
uggugccugagggaaccca

SEQ ID NO: 2067 - RNA, 19 nt, Artificial Sequence
  Description of Artificial Sequence: Synthetic oligonucleotide
ggugccugagggaacccau

SEQ ID NO: 2068 - RNA, 19 nt, Artificial Sequence
  Description of Artificial Sequence: Synthetic oligonucleotide
gugccugagggaacccauc

SEQ ID NO: 2069 - RNA, 19 nt, Artificial Sequence
  Description of Artificial Sequence: Synthetic oligonucleotide
ugccugagggaacccauca

SEQ ID NO: 2070 - RNA, 19 nt, Artificial Sequence
  Description of Artificial Sequence: Synthetic oligonucleotide
gccugagggaacccaucag

SEQ ID NO: 2071 - RNA, 19 nt, Artificial Sequence
  Description of Artificial Sequence: Synthetic oligonucleotide
ccugagggaacccaucagg

SEQ ID NO: 2072 - RNA, 19 nt, Artificial Sequence
  Description of Artificial Sequence: Synthetic oligonucleotide
cugagggaacccaucaggu

SEQ ID NO: 2073 - RNA, 19 nt, Artificial Sequence
  Description of Artificial Sequence: Synthetic oligonucleotide
ugagggaacccaucagguc

SEQ ID NO: 2074 - RNA, 19 nt, Artificial Sequence
  Description of Artificial Sequence: Synthetic oligonucleotide
gagggaacccaucagguca

SEQ ID NO: 2075 - RNA, 19 nt, Artificial Sequence
  Description of Artificial Sequence: Synthetic oligonucleotide
agggaacccaucaggucac

SEQ ID NO: 2076 - RNA, 19 nt, Artificial Sequence
  Description of Artificial Sequence: Synthetic oligonucleotide
gggaacccaucaggucacu

SEQ ID NO: 2077 - RNA, 19 nt, Artificial Sequence
  Description of Artificial Sequence: Synthetic oligonucleotide
ggaacccaucaggucacug

SEQ ID NO: 2078 - RNA, 19 nt, Artificial Sequence
  Description of Artificial Sequence: Synthetic oligonucleotide
gaacccaucaggucacugu

SEQ ID NO: 2079 - RNA, 19 nt, Artificial Sequence
  Description of Artificial Sequence: Synthetic oligonucleotide
aacccaucaggucacugug

SEQ ID NO: 2080 - RNA, 19 nt, Artificial Sequence
  Description of Artificial Sequence: Synthetic oligonucleotide
acccaucaggucacugugg

SEQ ID NO: 2081 - RNA, 19 nt, Artificial Sequence
  Description of Artificial Sequence: Synthetic oligonucleotide
cccaucaggucacuguggg

SEQ ID NO: 2082 - RNA, 19 nt, Artificial Sequence
  Description of Artificial Sequence: Synthetic oligonucleotide
ccaucaggucacugugggc

SEQ ID NO: 2083 - RNA, 19 nt, Artificial Sequence
  Description of Artificial Sequence: Synthetic oligonucleotide
caucaggucacugugggcc

SEQ ID NO: 2084 - RNA, 19 nt, Artificial Sequence
  Description of Artificial Sequence: Synthetic oligonucleotide
aucaggucacugugggcca

SEQ ID NO: 2085 - RNA, 19 nt, Artificial Sequence
  Description of Artificial Sequence: Synthetic oligonucleotide
ucaggucacugugggccaa

SEQ ID NO: 2086 - RNA, 19 nt, Artificial Sequence
  Description of Artificial Sequence: Synthetic oligonucleotide
caggucacugugggccaaa

SEQ ID NO: 2087 - RNA, 19 nt, Artificial Sequence
  Description of Artificial Sequence: Synthetic oligonucleotide
aggucacugugggccaaag

SEQ ID NO: 2088 - RNA, 19 nt, Artificial Sequence
  Description of Artificial Sequence: Synthetic oligonucleotide
ggucacugugggccaaagu

SEQ ID NO: 2089 - RNA, 19 nt, Artificial Sequence
  Description of Artificial Sequence: Synthetic oligonucleotide
gucacugugggccaaaguc

SEQ ID NO: 2090 - RNA, 19 nt, Artificial Sequence
  Description of Artificial Sequence: Synthetic oligonucleotide
ucacugugggccaaagucc

SEQ ID NO: 2091 - RNA, 19 nt, Artificial Sequence
  Description of Artificial Sequence: Synthetic oligonucleotide
cacugugggccaaaguccc

SEQ ID NO: 2092 - RNA, 19 nt, Artificial Sequence
  Description of Artificial Sequence: Synthetic oligonucleotide
acugugggccaaagucccu

SEQ ID NO: 2093 - RNA, 19 nt, Artificial Sequence
  Description of Artificial Sequence: Synthetic oligonucleotide
cugugggccaaagucccug

SEQ ID NO: 2094 - RNA, 19 nt, Artificial Sequence
  Description of Artificial Sequence: Synthetic oligonucleotide
ugugggccaaagucccugc

SEQ ID NO: 2095 - RNA, 19 nt, Artificial Sequence
  Description of Artificial Sequence: Synthetic oligonucleotide
gugggccaaagucccugcc

SEQ ID NO: 2096 - RNA, 19 nt, Artificial Sequence
  Description of Artificial Sequence: Synthetic oligonucleotide
ugggccaaagucccugccg

SEQ ID NO: 2097 - RNA, 19 nt, Artificial Sequence
  Description of Artificial Sequence: Synthetic oligonucleotide
gggccaaagucccugccgg

SEQ ID NO: 2098 - RNA, 19 nt, Artificial Sequence
  Description of Artificial Sequence: Synthetic oligonucleotide
ggccaaagucccugccggc

SEQ ID NO: 2099 - RNA, 19 nt, Artificial Sequence
  Description of Artificial Sequence: Synthetic oligonucleotide
gccaaagucccugccggcc

SEQ ID NO: 2100 - RNA, 19 nt, Artificial Sequence
  Description of Artificial Sequence: Synthetic oligonucleotide
ccaaagucccugccggcca

SEQ ID NO: 2101 - RNA, 19 nt, Artificial Sequence
  Description of Artificial Sequence: Synthetic oligonucleotide
caaagucccugccggccac

SEQ ID NO: 2102 - RNA, 19 nt, Artificial Sequence
  Description of Artificial Sequence: Synthetic oligonucleotide
aaagucccugccggccacu

SEQ ID NO: 2103 - RNA, 19 nt, Artificial Sequence
  Description of Artificial Sequence: Synthetic oligonucleotide
aagucccugccggccacug

SEQ ID NO: 2104 - RNA, 19 nt, Artificial Sequence
  Description of Artificial Sequence: Synthetic oligonucleotide
agucccugccggccacugc

SEQ ID NO: 2105 - RNA, 19 nt, Artificial Sequence
  Description of Artificial Sequence: Synthetic oligonucleotide
gucccugccggccacugcc

SEQ ID NO: 2106 - RNA, 19 nt, Artificial Sequence
  Description of Artificial Sequence: Synthetic oligonucleotide
ucccugccggccacugccc

SEQ ID NO: 2107 - RNA, 19 nt, Artificial Sequence
  Description of Artificial Sequence: Synthetic oligonucleotide
cccugccggccacugccca

SEQ ID NO: 2108 - RNA, 19 nt, Artificial Sequence
  Description of Artificial Sequence: Synthetic oligonucleotide
ccugccggccacugcccaa

SEQ ID NO: 2109 - RNA, 19 nt, Artificial Sequence
  Description of Artificial Sequence: Synthetic oligonucleotide
cugccggccacugcccaag

SEQ ID NO: 2110 - RNA, 19 nt, Artificial Sequence
  Description of Artificial Sequence: Synthetic oligonucleotide
ugccggccacugcccaagg

SEQ ID NO: 2111 - RNA, 19 nt, Artificial Sequence
  Description of Artificial Sequence: Synthetic oligonucleotide
gccggccacugcccaagga

SEQ ID NO: 2112 - RNA, 19 nt, Artificial Sequence
  Description of Artificial Sequence: Synthetic oligonucleotide
ccggccacugcccaaggac

SEQ ID NO: 2113 - RNA, 19 nt, Artificial Sequence
  Description of Artificial Sequence: Synthetic oligonucleotide
cggccacugcccaaggaca

SEQ ID NO: 2114 - RNA, 19 nt, Artificial Sequence
  Description of Artificial Sequence: Synthetic oligonucleotide
ggccacugcccaaggacag

SEQ ID NO: 2115 - RNA, 19 nt, Artificial Sequence
  Description of Artificial Sequence: Synthetic oligonucleotide
gccacugcccaaggacagc

SEQ ID NO: 2116 - RNA, 19 nt, Artificial Sequence
  Description of Artificial Sequence: Synthetic oligonucleotide
ccacugcccaaggacagcu

SEQ ID NO: 2117 - RNA, 19 nt, Artificial Sequence
  Description of Artificial Sequence: Synthetic oligonucleotide
cacugcccaaggacagcuc

SEQ ID NO: 2118 - RNA, 19 nt, Artificial Sequence
  Description of Artificial Sequence: Synthetic oligonucleotide
acugcccaaggacagcuca

SEQ ID NO: 2119 - RNA, 19 nt, Artificial Sequence
  Description of Artificial Sequence: Synthetic oligonucleotide
cugcccaaggacagcucaa

SEQ ID NO: 2120 - RNA, 19 nt, Artificial Sequence
  Description of Artificial Sequence: Synthetic oligonucleotide
ugcccaaggacagcucaaa

SEQ ID NO: 2121 - RNA, 19 nt, Artificial Sequence
  Description of Artificial Sequence: Synthetic oligonucleotide
gcccaaggacagcucaaaa

SEQ ID NO: 2122 - RNA, 19 nt, Artificial Sequence
  Description of Artificial Sequence: Synthetic oligonucleotide
cccaaggacagcucaaaac

SEQ ID NO: 2123 - RNA, 19 nt, Artificial Sequence
  Description of Artificial Sequence: Synthetic oligonucleotide
ccaaggacagcucaaaacu

SEQ ID NO: 2124 - RNA, 19 nt, Artificial Sequence
  Description of Artificial Sequence: Synthetic oligonucleotide
caaggacagcucaaaacuc

SEQ ID NO: 2125 - RNA, 19 nt, Artificial Sequence
  Description of Artificial Sequence: Synthetic oligonucleotide
aaggacagcucaaaacuca

SEQ ID NO: 2126 - RNA, 19 nt, Artificial Sequence
  Description of Artificial Sequence: Synthetic oligonucleotide
aggacagcucaaaacucag

SEQ ID NO: 2127 - RNA, 19 nt, Artificial Sequence
  Description of Artificial Sequence: Synthetic oligonucleotide
ggacagcucaaaacucaga

SEQ ID NO: 2128 - RNA, 19 nt, Artificial Sequence
  Description of Artificial Sequence: Synthetic oligonucleotide
gacagcucaaaacucagac

SEQ ID NO: 2129 - RNA, 19 nt, Artificial Sequence
  Description of Artificial Sequence: Synthetic oligonucleotide
acagcucaaaacucagacc

SEQ ID NO: 2130 - RNA, 19 nt, Artificial Sequence
  Description of Artificial Sequence: Synthetic oligonucleotide
cagcucaaaacucagacca

SEQ ID NO: 2131 - RNA, 19 nt, Artificial Sequence
  Description of Artificial Sequence: Synthetic oligonucleotide
agcucaaaacucagaccag

SEQ ID NO: 2132 - RNA, 19 nt, Artificial Sequence
  Description of Artificial Sequence: Synthetic oligonucleotide
gcucaaaacucagaccagu

SEQ ID NO: 2133 - RNA, 19 nt, Artificial Sequence
  Description of Artificial Sequence: Synthetic oligonucleotide
cucaaaacucagaccagug

SEQ ID NO: 2134 - RNA, 19 nt, Artificial Sequence
  Description of Artificial Sequence: Synthetic oligonucleotide
ucaaaacucagaccagugc

SEQ ID NO: 2135 - RNA, 19 nt, Artificial Sequence
  Description of Artificial Sequence: Synthetic oligonucleotide
caaaacucagaccagugcc

SEQ ID NO: 2136 - RNA, 19 nt, Artificial Sequence
  Description of Artificial Sequence: Synthetic oligonucleotide
aaaacucagaccagugccc

SEQ ID NO: 2137 - RNA, 19 nt, Artificial Sequence
  Description of Artificial Sequence: Synthetic oligonucleotide
aaacucagaccagugcccc

SEQ ID NO: 2138 - RNA, 19 nt, Artificial Sequence
  Description of Artificial Sequence: Synthetic oligonucleotide
aacucagaccagugccccg

SEQ ID NO: 2139 - RNA, 19 nt, Artificial Sequence
  Description of Artificial Sequence: Synthetic oligonucleotide
acucagaccagugccccgg

SEQ ID NO: 2140 - RNA, 19 nt, Artificial Sequence
  Description of Artificial Sequence: Synthetic oligonucleotide
cucagaccagugccccgga

SEQ ID NO: 2141 - RNA, 19 nt, Artificial Sequence
  Description of Artificial Sequence: Synthetic oligonucleotide
ucagaccagugccccggaa

SEQ ID NO: 2142 - RNA, 19 nt, Artificial Sequence
  Description of Artificial Sequence: Synthetic oligonucleotide
cagaccagugccccggaaa

SEQ ID NO: 2143 - RNA, 19 nt, Artificial Sequence
  Description of Artificial Sequence: Synthetic oligonucleotide
agaccagugccccggaaag

SEQ ID NO: 2144 - RNA, 19 nt, Artificial Sequence
  Description of Artificial Sequence: Synthetic oligonucleotide
gaccagugccccggaaaga

SEQ ID NO: 2145 - RNA, 19 nt, Artificial Sequence
  Description of Artificial Sequence: Synthetic oligonucleotide
accagugccccggaaagac

SEQ ID NO: 2146 - RNA, 19 nt, Artificial Sequence
  Description of Artificial Sequence: Synthetic oligonucleotide
ccagugccccggaaagacu

SEQ ID NO: 2147 - RNA, 19 nt, Artificial Sequence
  Description of Artificial Sequence: Synthetic oligonucleotide
cagugccccggaaagacuu

SEQ ID NO: 2148 - RNA, 19 nt, Artificial Sequence
  Description of Artificial Sequence: Synthetic oligonucleotide
agugccccggaaagacuuu

SEQ ID NO: 2149 - RNA, 19 nt, Artificial Sequence
  Description of Artificial Sequence: Synthetic oligonucleotide
gugccccggaaagacuuug

SEQ ID NO: 2150 - RNA, 19 nt, Artificial Sequence
  Description of Artificial Sequence: Synthetic oligonucleotide
ugccccggaaagacuuugu

SEQ ID NO: 2151 - RNA, 19 nt, Artificial Sequence
  Description of Artificial Sequence: Synthetic oligonucleotide
gccccggaaagacuuugua

SEQ ID NO: 2152 - RNA, 19 nt, Artificial Sequence
  Description of Artificial Sequence: Synthetic oligonucleotide
ccccggaaagacuuuguag

SEQ ID NO: 2153 - RNA, 19 nt, Artificial Sequence
  Description of Artificial Sequence: Synthetic oligonucleotide
cccggaaagacuuuguaga

SEQ ID NO: 2154 - RNA, 19 nt, Artificial Sequence
  Description of Artificial Sequence: Synthetic oligonucleotide
ccggaaagacuuuguagag

SEQ ID NO: 2155 - RNA, 19 nt, Artificial Sequence
  Description of Artificial Sequence: Synthetic oligonucleotide
cggaaagacuuuguagagg

SEQ ID NO: 2156 - RNA, 19 nt, Artificial Sequence
  Description of Artificial Sequence: Synthetic oligonucleotide
ggaaagacuuuguagagga

SEQ ID NO: 2157 - RNA, 19 nt, Artificial Sequence
  Description of Artificial Sequence: Synthetic oligonucleotide
gaaagacuuuguagaggag

SEQ ID NO: 2158 - RNA, 19 nt, Artificial Sequence
  Description of Artificial Sequence: Synthetic oligonucleotide
aaagacuuuguagaggagu

SEQ ID NO: 2159 - RNA, 19 nt, Artificial Sequence
  Description of Artificial Sequence: Synthetic oligonucleotide
aagacuuuguagaggaguu

SEQ ID NO: 2160 - RNA, 19 nt, Artificial Sequence
  Description of Artificial Sequence: Synthetic oligonucleotide
agacuuuguagaggaguuu

SEQ ID NO: 2161 - RNA, 19 nt, Artificial Sequence
  Description of Artificial Sequence: Synthetic oligonucleotide
gacuuuguagaggaguuug

SEQ ID NO: 2162 - RNA, 19 nt, Artificial Sequence
  Description of Artificial Sequence: Synthetic oligonucleotide
acuuuguagaggaguuuga

SEQ ID NO: 2163 - RNA, 19 nt, Artificial Sequence
  Description of Artificial Sequence: Synthetic oligonucleotide
cuuuguagaggaguuugag

SEQ ID NO: 2164 - RNA, 19 nt, Artificial Sequence
  Description of Artificial Sequence: Synthetic oligonucleotide
uuuguagaggaguuugagu

SEQ ID NO: 2165 - RNA, 19 nt, Artificial Sequence
  Description of Artificial Sequence: Synthetic oligonucleotide
uuguagaggaguuugagug

SEQ ID NO: 2166 - RNA, 19 nt, Artificial Sequence
  Description of Artificial Sequence: Synthetic oligonucleotide
uguagaggaguuugagugu

SEQ ID NO: 2167 - RNA, 19 nt, Artificial Sequence
  Description of Artificial Sequence: Synthetic oligonucleotide
guagaggaguuugagugug

SEQ ID NO: 2168 - RNA, 19 nt, Artificial Sequence
  Description of Artificial Sequence: Synthetic oligonucleotide
uagaggaguuugaguguga

SEQ ID NO: 2169 - RNA, 19 nt, Artificial Sequence
  Description of Artificial Sequence: Synthetic oligonucleotide
agaggaguuugagugugaa

SEQ ID NO: 2170 - RNA, 19 nt, Artificial Sequence
  Description of Artificial Sequence: Synthetic oligonucleotide
gaggaguuugagugugaac

SEQ ID NO: 2171 - RNA, 19 nt, Artificial Sequence
  Description of Artificial Sequence: Synthetic oligonucleotide
aggaguuugagugugaacu

SEQ ID NO: 2172 - RNA, 19 nt, Artificial Sequence
  Description of Artificial Sequence: Synthetic oligonucleotide
ggaguuugagugugaacug

SEQ ID NO: 2173 - RNA, 19 nt, Artificial Sequence
  Description of Artificial Sequence: Synthetic oligonucleotide
gaguuugagugugaacugg

SEQ ID NO: 2174 - RNA, 19 nt, Artificial Sequence
  Description of Artificial Sequence: Synthetic oligonucleotide
aguuugagugugaacugga

SEQ ID NO: 2175 - RNA, 19 nt, Artificial Sequence
  Description of Artificial Sequence: Synthetic oligonucleotide
guuugagugugaacuggag

SEQ ID NO: 2176 - RNA, 19 nt, Artificial Sequence
  Description of Artificial Sequence: Synthetic oligonucleotide
uuugagugugaacuggagc

SEQ ID NO: 2177 - RNA, 19 nt, Artificial Sequence
  Description of Artificial Sequence: Synthetic oligonucleotide
uugagugugaacuggagcc

SEQ ID NO: 2178 - RNA, 19 nt, Artificial Sequence
  Description of Artificial Sequence: Synthetic oligonucleotide
ugagugugaacuggagccc

SEQ ID NO: 2179 - RNA, 19 nt, Artificial Sequence
  Description of Artificial Sequence: Synthetic oligonucleotide
gagugugaacuggagcccu

SEQ ID NO: 2180 - RNA, 19 nt, Artificial Sequence
  Description of Artificial Sequence: Synthetic oligonucleotide
agugugaacuggagcccuu

SEQ ID NO: 2181 - RNA, 19 nt, Artificial Sequence
  Description of Artificial Sequence: Synthetic oligonucleotide
gugugaacuggagcccuug

SEQ ID NO: 2182 - RNA, 19 nt, Artificial Sequence
  Description of Artificial Sequence: Synthetic oligonucleotide
ugugaacuggagcccuugg

SEQ ID NO: 2183 - RNA, 19 nt, Artificial Sequence
  Description of Artificial Sequence: Synthetic oligonucleotide
gugaacuggagcccuuggg

SEQ ID NO: 2184 - RNA, 19 nt, Artificial Sequence
  Description of Artificial Sequence: Synthetic oligonucleotide
ugaacuggagcccuugggc

SEQ ID NO: 2185 - RNA, 19 nt, Artificial Sequence
  Description of Artificial Sequence: Synthetic oligonucleotide
gaacuggagcccuugggca

SEQ ID NO: 2186 - RNA, 19 nt, Artificial Sequence
  Description of Artificial Sequence: Synthetic oligonucleotide
aacuggagcccuugggcac

SEQ ID NO: 2187 - RNA, 19 nt, Artificial Sequence
  Description of Artificial Sequence: Synthetic oligonucleotide
acuggagcccuugggcacc

SEQ ID NO: 2188 - RNA, 19 nt, Artificial Sequence
  Description of Artificial Sequence: Synthetic oligonucleotide
cuggagcccuugggcaccc

SEQ ID NO: 2189 - RNA, 19 nt, Artificial Sequence
  Description of Artificial Sequence: Synthetic oligonucleotide
uggagcccuugggcaccca

SEQ ID NO: 2190 - RNA, 19 nt, Artificial Sequence
  Description of Artificial Sequence: Synthetic oligonucleotide
ggagcccuugggcacccag

SEQ ID NO: 2191 - RNA, 19 nt, Artificial Sequence
  Description of Artificial Sequence: Synthetic oligonucleotide
gagcccuugggcacccagg

SEQ ID NO: 2192 - RNA, 19 nt, Artificial Sequence
  Description of Artificial Sequence: Synthetic oligonucleotide
agcccuugggcacccaggc

SEQ ID NO: 2193 - RNA, 19 nt, Artificial Sequence
  Description of Artificial Sequence: Synthetic oligonucleotide
gcccuugggcacccaggca

SEQ ID NO: 2194 - RNA, 19 nt, Artificial Sequence
  Description of Artificial Sequence: Synthetic oligonucleotide
cccuugggcacccaggcag

SEQ ID NO: 2195 - RNA, 19 nt, Artificial Sequence
  Description of Artificial Sequence: Synthetic oligonucleotide
ccuugggcacccaggcagu

SEQ ID NO: 2196 - RNA, 19 nt, Artificial Sequence
  Description of Artificial Sequence: Synthetic oligonucleotide
cuugggcacccaggcagug

SEQ ID NO: 2197 - RNA, 19 nt, Artificial Sequence
  Description of Artificial Sequence: Synthetic oligonucleotide
uugggcacccaggcagugg

SEQ ID NO: 2198 - RNA, 19 nt, Artificial Sequence
  Description of Artificial Sequence: Synthetic oligonucleotide
ugggcacccaggcaguggg

SEQ ID NO: 2199 - RNA, 19 nt, Artificial Sequence
  Description of Artificial Sequence: Synthetic oligonucleotide
gggcacccaggcagugggg

SEQ ID NO: 2200 - RNA, 19 nt, Artificial Sequence
  Description of Artificial Sequence: Synthetic oligonucleotide
ggcacccaggcaguggggc

SEQ ID NO: 2201 - RNA, 19 nt, Artificial Sequence
  Description of Artificial Sequence: Synthetic oligonucleotide
gcacccaggcaguggggcc

SEQ ID NO: 2202 - RNA, 19 nt, Artificial Sequence
  Description of Artificial Sequence: Synthetic oligonucleotide
cacccaggcaguggggccu

SEQ ID NO: 2203 - RNA, 19 nt, Artificial Sequence
  Description of Artificial Sequence: Synthetic oligonucleotide
acccaggcaguggggccua

SEQ ID NO: 2204 - RNA, 19 nt, Artificial Sequence
  Description of Artificial Sequence: Synthetic oligonucleotide
cccaggcaguggggccuac

SEQ ID NO: 2205 - RNA, 19 nt, Artificial Sequence
  Description of Artificial Sequence: Synthetic oligonucleotide
ccaggcaguggggccuacc

SEQ ID NO: 2206 - RNA, 19 nt, Artificial Sequence
  Description of Artificial Sequence: Synthetic oligonucleotide
caggcaguggggccuacca

SEQ ID NO: 2207 - RNA, 19 nt, Artificial Sequence
  Description of Artificial Sequence: Synthetic oligonucleotide
aggcaguggggccuaccaa

SEQ ID NO: 2208 - RNA, 19 nt, Artificial Sequence
  Description of Artificial Sequence: Synthetic oligonucleotide
ggcaguggggccuaccaac

SEQ ID NO: 2209 - RNA, 19 nt, Artificial Sequence
  Description of Artificial Sequence: Synthetic oligonucleotide
gcaguggggccuaccaacg

SEQ ID NO: 2210 - RNA, 19 nt, Artificial Sequence
  Description of Artificial Sequence: Synthetic oligonucleotide
caguggggccuaccaacgu

SEQ ID NO: 2211 - RNA, 19 nt, Artificial Sequence
  Description of Artificial Sequence: Synthetic oligonucleotide
aguggggccuaccaacguc

SEQ ID NO: 2212 - RNA, 19 nt, Artificial Sequence
  Description of Artificial Sequence: Synthetic oligonucleotide
guggggccuaccaacguca

SEQ ID NO: 2213 - RNA, 19 nt, Artificial Sequence
  Description of Artificial Sequence: Synthetic oligonucleotide
uggggccuaccaacgucag

SEQ ID NO: 2214 - RNA, 19 nt, Artificial Sequence
  Description of Artificial Sequence: Synthetic oligonucleotide
ggggccuaccaacgucagc

SEQ ID NO: 2215 - RNA, 19 nt, Artificial Sequence
  Description of Artificial Sequence: Synthetic oligonucleotide
gggccuaccaacgucagcc

SEQ ID NO: 2216 - RNA, 19 nt, Artificial Sequence
  Description of Artificial Sequence: Synthetic oligonucleotide
ggccuaccaacgucagccu

SEQ ID NO: 2217 - RNA, 19 nt, Artificial Sequence
  Description of Artificial Sequence: Synthetic oligonucleotide
gccuaccaacgucagccuc

SEQ ID NO: 2218 - RNA, 19 nt, Artificial Sequence
  Description of Artificial Sequence: Synthetic oligonucleotide
ccuaccaacgucagccuca

SEQ ID NO: 2219 - RNA, 19 nt, Artificial Sequence
  Description of Artificial Sequence: Synthetic oligonucleotide
cuaccaacgucagccucac

SEQ ID NO: 2220 - RNA, 19 nt, Artificial Sequence
  Description of Artificial Sequence: Synthetic oligonucleotide
uaccaacgucagccucacc

SEQ ID NO: 2221 - RNA, 19 nt, Artificial Sequence
  Description of Artificial Sequence: Synthetic oligonucleotide
accaacgucagccucaccg

SEQ ID NO: 2222 - RNA, 19 nt, Artificial Sequence
  Description of Artificial Sequence: Synthetic oligonucleotide
ccaacgucagccucaccgu

SEQ ID NO: 2223 - RNA, 19 nt, Artificial Sequence
  Description of Artificial Sequence: Synthetic oligonucleotide
caacgucagccucaccgug

SEQ ID NO: 2224 - RNA, 19 nt, Artificial Sequence
  Description of Artificial Sequence: Synthetic oligonucleotide
aacgucagccucaccguga

SEQ ID NO: 2225 - RNA, 19 nt, Artificial Sequence
  Description of Artificial Sequence: Synthetic oligonucleotide
acgucagccucaccgugac

SEQ ID NO: 2226 - RNA, 19 nt, Artificial Sequence
  Description of Artificial Sequence: Synthetic oligonucleotide
cgucagccucaccgugacu

SEQ ID NO: 2227 - RNA, 19 nt, Artificial Sequence
  Description of Artificial Sequence: Synthetic oligonucleotide
gucagccucaccgugacua

SEQ ID NO: 2228 - RNA, 19 nt, Artificial Sequence
  Description of Artificial Sequence: Synthetic oligonucleotide
ucagccucaccgugacuaa

SEQ ID NO: 2229 - RNA, 19 nt, Artificial Sequence
  Description of Artificial Sequence: Synthetic oligonucleotide
cagccucaccgugacuaac

SEQ ID NO: 2230 - RNA, 19 nt, Artificial Sequence
  Description of Artificial Sequence: Synthetic oligonucleotide
agccucaccgugacuaaca

SEQ ID NO: 2231 - RNA, 19 nt, Artificial Sequence
  Description of Artificial Sequence: Synthetic oligonucleotide
gccucaccgugacuaacau

SEQ ID NO: 2232 - RNA, 19 nt, Artificial Sequence
  Description of Artificial Sequence: Synthetic oligonucleotide
ccucaccgugacuaacaug

SEQ ID NO: 2233 - RNA, 19 nt, Artificial Sequence
  Description of Artificial Sequence: Synthetic oligonucleotide
cucaccgugacuaacaugc

SEQ ID NO: 2234 - RNA, 19 nt, Artificial Sequence
  Description of Artificial Sequence: Synthetic oligonucleotide
ucaccgugacuaacaugcc

SEQ ID NO: 2235 - RNA, 19 nt, Artificial Sequence
  Description of Artificial Sequence: Synthetic oligonucleotide
caccgugacuaacaugcca

SEQ ID NO: 2236 - RNA, 19 nt, Artificial Sequence
  Description of Artificial Sequence: Synthetic oligonucleotide
accgugacuaacaugccac

SEQ ID NO: 2237 - RNA, 19 nt, Artificial Sequence
  Description of Artificial Sequence: Synthetic oligonucleotide
ccgugacuaacaugccacc

SEQ ID NO: 2238 - RNA, 19 nt, Artificial Sequence
  Description of Artificial Sequence: Synthetic oligonucleotide
cgugacuaacaugccaccg

SEQ ID NO: 2239 - RNA, 19 nt, Artificial Sequence
  Description of Artificial Sequence: Synthetic oligonucleotide
gugacuaacaugccaccgg

SEQ ID NO: 2240 - RNA, 19 nt, Artificial Sequence
  Description of Artificial Sequence: Synthetic oligonucleotide
ugacuaacaugccaccggg

SEQ ID NO: 2241 - RNA, 19 nt, Artificial Sequence
  Description of Artificial Sequence: Synthetic oligonucleotide
gacuaacaugccaccgggc

SEQ ID NO: 2242 - RNA, 19 nt, Artificial Sequence
  Description of Artificial Sequence: Synthetic oligonucleotide
acuaacaugccaccgggca

SEQ ID NO: 2243 - RNA, 19 nt, Artificial Sequence
  Description of Artificial Sequence: Synthetic oligonucleotide
cuaacaugccaccgggcaa

SEQ ID NO: 2244 - RNA, 19 nt, Artificial Sequence
  Description of Artificial Sequence: Synthetic oligonucleotide
uaacaugccaccgggcaag

SEQ ID NO: 2245 - RNA, 19 nt, Artificial Sequence
  Description of Artificial Sequence: Synthetic oligonucleotide
aacaugccaccgggcaagc

SEQ ID NO: 2246 - RNA, 19 nt, Artificial Sequence
  Description of Artificial Sequence: Synthetic oligonucleotide
acaugccaccgggcaagca

SEQ ID NO: 2247 - RNA, 19 nt, Artificial Sequence
  Description of Artificial Sequence: Synthetic oligonucleotide
caugccaccgggcaagcac

SEQ ID NO: 2248 - RNA, 19 nt, Artificial Sequence
  Description of Artificial Sequence: Synthetic oligonucleotide
augccaccgggcaagcacu

SEQ ID NO: 2249 - RNA, 19 nt, Artificial Sequence
  Description of Artificial Sequence: Synthetic oligonucleotide
ugccaccgggcaagcacuu

SEQ ID NO: 2250 - RNA, 19 nt, Artificial Sequence
  Description of Artificial Sequence: Synthetic oligonucleotide
gccaccgggcaagcacuuc

SEQ ID NO: 2251 - RNA, 19 nt, Artificial Sequence
  Description of Artificial Sequence: Synthetic oligonucleotide
ccaccgggcaagcacuucc

SEQ ID NO: 2252 - RNA, 19 nt, Artificial Sequence
  Description of Artificial Sequence: Synthetic oligonucleotide
caccgggcaagcacuuccg

SEQ ID NO: 2253 - RNA, 19 nt, Artificial Sequence
  Description of Artificial Sequence: Synthetic oligonucleotide
accgggcaagcacuuccgg

SEQ ID NO: 2254 - RNA, 19 nt, Artificial Sequence
  Description of Artificial Sequence: Synthetic oligonucleotide
ccgggcaagcacuuccggg

SEQ ID NO: 2255 - RNA, 19 nt, Artificial Sequence
  Description of Artificial Sequence: Synthetic oligonucleotide
cgggcaagcacuuccgggu

SEQ ID NO: 2256 - RNA, 19 nt, Artificial Sequence
  Description of Artificial Sequence: Synthetic oligonucleotide
gggcaagcacuuccgggua

SEQ ID NO: 2257 - RNA, 19 nt, Artificial Sequence
  Description of Artificial Sequence: Synthetic oligonucleotide
ggcaagcacuuccggguag

SEQ ID NO: 2258 - RNA, 19 nt, Artificial Sequence
  Description of Artificial Sequence: Synthetic oligonucleotide
gcaagcacuuccggguaga

SEQ ID NO: 2259 - RNA, 19 nt, Artificial Sequence
  Description of Artificial Sequence: Synthetic oligonucleotide
caagcacuuccggguagac

SEQ ID NO: 2260 - RNA, 19 nt, Artificial Sequence
  Description of Artificial Sequence: Synthetic oligonucleotide
aagcacuuccggguagacg

SEQ ID NO: 2261 - RNA, 19 nt, Artificial Sequence
  Description of Artificial Sequence: Synthetic oligonucleotide
agcacuuccggguagacgg

SEQ ID NO: 2262 - RNA, 19 nt, Artificial Sequence
  Description of Artificial Sequence: Synthetic oligonucleotide
gcacuuccggguagacggc

SEQ ID NO: 2263 - RNA, 19 nt, Artificial Sequence
  Description of Artificial Sequence: Synthetic oligonucleotide
cacuuccggguagacggca

SEQ ID NO: 2264 - RNA, 19 nt, Artificial Sequence
  Description of Artificial Sequence: Synthetic oligonucleotide
acuuccggguagacggcac

SEQ ID NO: 2265 - RNA, 19 nt, Artificial Sequence
  Description of Artificial Sequence: Synthetic oligonucleotide
cuuccggguagacggcacc

SEQ ID NO: 2266 - RNA, 19 nt, Artificial Sequence
  Description of Artificial Sequence: Synthetic oligonucleotide
uuccggguagacggcaccu

SEQ ID NO: 2267 - RNA, 19 nt, Artificial Sequence
  Description of Artificial Sequence: Synthetic oligonucleotide
uccggguagacggcaccuc

SEQ ID NO: 2268 - RNA, 19 nt, Artificial Sequence
  Description of Artificial Sequence: Synthetic oligonucleotide
ccggguagacggcaccucc

SEQ ID NO: 2269 - RNA, 19 nt, Artificial Sequence
  Description of Artificial Sequence: Synthetic oligonucleotide
cggguagacggcaccuccg

SEQ ID NO: 2270 - RNA, 19 nt, Artificial Sequence
  Description of Artificial Sequence: Synthetic oligonucleotide
ggguagacggcaccuccgu

SEQ ID NO: 2271 - RNA, 19 nt, Artificial Sequence
  Description of Artificial Sequence: Synthetic oligonucleotide
gguagacggcaccuccgug

SEQ ID NO: 2272 - RNA, 19 nt, Artificial Sequence
  Description of Artificial Sequence: Synthetic oligonucleotide
guagacggcaccuccgugc

SEQ ID NO: 2273 - RNA, 19 nt, Artificial Sequence
  Description of Artificial Sequence: Synthetic oligonucleotide
uagacggcaccuccgugcu

SEQ ID NO: 2274 - RNA, 19 nt, Artificial Sequence
  Description of Artificial Sequence: Synthetic oligonucleotide
agacggcaccuccgugcug

SEQ ID NO: 2275 - RNA, 19 nt, Artificial Sequence
  Description of Artificial Sequence: Synthetic oligonucleotide
gacggcaccuccgugcuga

SEQ ID NO: 2276 - RNA, 19 nt, Artificial Sequence
  Description of Artificial Sequence: Synthetic oligonucleotide
acggcaccuccgugcugag

SEQ ID NO: 2277 - RNA, 19 nt, Artificial Sequence
  Description of Artificial Sequence: Synthetic oligonucleotide
cggcaccuccgugcugaga

SEQ ID NO: 2278 - RNA, 19 nt, Artificial Sequence
  Description of Artificial Sequence: Synthetic oligonucleotide
ggcaccuccgugcugagag

SEQ ID NO: 2279 - RNA, 19 nt, Artificial Sequence
  Description of Artificial Sequence: Synthetic oligonucleotide
gcaccuccgugcugagagg

SEQ ID NO: 2280 - RNA, 19 nt, Artificial Sequence
  Description of Artificial Sequence: Synthetic oligonucleotide
caccuccgugcugagaggc

SEQ ID NO: 2281 - RNA, 19 nt, Artificial Sequence
  Description of Artificial Sequence: Synthetic oligonucleotide
accuccgugcugagaggcu

SEQ ID NO: 2282 - RNA, 19 nt, Artificial Sequence
  Description of Artificial Sequence: Synthetic oligonucleotide
ccuccgugcugagaggcuu

SEQ ID NO: 2283 - RNA, 19 nt, Artificial Sequence
  Description of Artificial Sequence: Synthetic oligonucleotide
cuccgugcugagaggcuuc

SEQ ID NO: 2284 - RNA, 19 nt, Artificial Sequence
  Description of Artificial Sequence: Synthetic oligonucleotide
uccgugcugagaggcuucu

SEQ ID NO: 2285 - RNA, 19 nt, Artificial Sequence
  Description of Artificial Sequence: Synthetic oligonucleotide
ccgugcugagaggcuucuc

SEQ ID NO: 2286 - RNA, 19 nt, Artificial Sequence
  Description of Artificial Sequence: Synthetic oligonucleotide
cgugcugagaggcuucucu

SEQ ID NO: 2287 - RNA, 19 nt, Artificial Sequence
  Description of Artificial Sequence: Synthetic oligonucleotide
gugcugagaggcuucucuu

SEQ ID NO: 2288 - RNA, 19 nt, Artificial Sequence
  Description of Artificial Sequence: Synthetic oligonucleotide
ugcugagaggcuucucuuu

SEQ ID NO: 2289 - RNA, 19 nt, Artificial Sequence
  Description of Artificial Sequence: Synthetic oligonucleotide
gcugagaggcuucucuuuc

SEQ ID NO: 2290 - RNA, 19 nt, Artificial Sequence
  Description of Artificial Sequence: Synthetic oligonucleotide
cugagaggcuucucuuuca

SEQ ID NO: 2291 - RNA, 19 nt, Artificial Sequence
  Description of Artificial Sequence: Synthetic oligonucleotide
ugagaggcuucucuuucau

SEQ ID NO: 2292 - RNA, 19 nt, Artificial Sequence
  Description of Artificial Sequence: Synthetic oligonucleotide
gagaggcuucucuuucaug

SEQ ID NO: 2293 - RNA, 19 nt, Artificial Sequence
  Description of Artificial Sequence: Synthetic oligonucleotide
agaggcuucucuuucaugg

SEQ ID NO: 2294 - RNA, 19 nt, Artificial Sequence
  Description of Artificial Sequence: Synthetic oligonucleotide
gaggcuucucuuucaugga

SEQ ID NO: 2295 - RNA, 19 nt, Artificial Sequence
  Description of Artificial Sequence: Synthetic oligonucleotide
aggcuucucuuucauggag

SEQ ID NO: 2296 - RNA, 19 nt, Artificial Sequence
  Description of Artificial Sequence: Synthetic oligonucleotide
ggcuucucuuucauggagc

SEQ ID NO: 2297 - RNA, 19 nt, Artificial Sequence
  Description of Artificial Sequence: Synthetic oligonucleotide
gcuucucuuucauggagcc

SEQ ID NO: 2298 - RNA, 19 nt, Artificial Sequence
  Description of Artificial Sequence: Synthetic oligonucleotide
cuucucuuucauggagcca

SEQ ID NO: 2299 - RNA, 19 nt, Artificial Sequence
  Description of Artificial Sequence: Synthetic oligonucleotide
uucucuuucauggagccag

SEQ ID NO: 2300 - RNA, 19 nt, Artificial Sequence
  Description of Artificial Sequence: Synthetic oligonucleotide
ucucuuucauggagccagu

SEQ ID NO: 2301 - RNA, 19 nt, Artificial Sequence
  Description of Artificial Sequence: Synthetic oligonucleotide
cucuuucauggagccagug

SEQ ID NO: 2302 - RNA, 19 nt, Artificial Sequence
  Description of Artificial Sequence: Synthetic oligonucleotide
ucuuucauggagccagugc

SEQ ID NO: 2303 - RNA, 19 nt, Artificial Sequence
  Description of Artificial Sequence: Synthetic oligonucleotide
cuuucauggagccagugcu

SEQ ID NO: 2304 - RNA, 19 nt, Artificial Sequence
  Description of Artificial Sequence: Synthetic oligonucleotide
uuucauggagccagugcug

SEQ ID NO: 2305 - RNA, 19 nt, Artificial Sequence
  Description of Artificial Sequence: Synthetic oligonucleotide
uucauggagccagugcuga

SEQ ID NO: 2306 - RNA, 19 nt, Artificial Sequence
  Description of Artificial Sequence: Synthetic oligonucleotide
ucauggagccagugcugau

SEQ ID NO: 2307 - RNA, 19 nt, Artificial Sequence
  Description of Artificial Sequence: Synthetic oligonucleotide
cauggagccagugcugaua

SEQ ID NO: 2308 - RNA, 19 nt, Artificial Sequence
  Description of Artificial Sequence: Synthetic oligonucleotide
auggagccagugcugauag

SEQ ID NO: 2309 - RNA, 19 nt, Artificial Sequence
  Description of Artificial Sequence: Synthetic oligonucleotide
uggagccagugcugauagc

SEQ ID NO: 2310 - RNA, 19 nt, Artificial Sequence
  Description of Artificial Sequence: Synthetic oligonucleotide
ggagccagugcugauagca

SEQ ID NO: 2311 - RNA, 19 nt, Artificial Sequence
  Description of Artificial Sequence: Synthetic oligonucleotide
gagccagugcugauagcag

SEQ ID NO: 2312 - RNA, 19 nt, Artificial Sequence
  Description of Artificial Sequence: Synthetic oligonucleotide
agccagugcugauagcagu

SEQ ID NO: 2313 - RNA, 19 nt, Artificial Sequence
  Description of Artificial Sequence: Synthetic oligonucleotide
gccagugcugauagcagug

SEQ ID NO: 2314 - RNA, 19 nt, Artificial Sequence
  Description of Artificial Sequence: Synthetic oligonucleotide
ccagugcugauagcagugc

SEQ ID NO: 2315 - RNA, 19 nt, Artificial Sequence
  Description of Artificial Sequence: Synthetic oligonucleotide
cagugcugauagcagugca

SEQ ID NO: 2316 - RNA, 19 nt, Artificial Sequence
  Description of Artificial Sequence: Synthetic oligonucleotide
agugcugauagcagugcaa

SEQ ID NO: 2317 - RNA, 19 nt, Artificial Sequence
  Description of Artificial Sequence: Synthetic oligonucleotide
gugcugauagcagugcaac

SEQ ID NO: 2318 - RNA, 19 nt, Artificial Sequence
  Description of Artificial Sequence: Synthetic oligonucleotide
ugcugauagcagugcaacc

SEQ ID NO: 2319 - RNA, 19 nt, Artificial Sequence
  Description of Artificial Sequence: Synthetic oligonucleotide
gcugauagcagugcaaccc

SEQ ID NO: 2320 - RNA, 19 nt, Artificial Sequence
  Description of Artificial Sequence: Synthetic oligonucleotide
cugauagcagugcaacccc

SEQ ID NO: 2321 - RNA, 19 nt, Artificial Sequence
  Description of Artificial Sequence: Synthetic oligonucleotide
ugauagcagugcaaccccu

SEQ ID NO: 2322 - RNA, 19 nt, Artificial Sequence
  Description of Artificial Sequence: Synthetic oligonucleotide
gauagcagugcaaccccuc

SEQ ID NO: 2323 - RNA, 19 nt, Artificial Sequence
  Description of Artificial Sequence: Synthetic oligonucleotide
auagcagugcaaccccucu

SEQ ID NO: 2324 - RNA, 19 nt, Artificial Sequence
  Description of Artificial Sequence: Synthetic oligonucleotide
uagcagugcaaccccucuu

SEQ ID NO: 2325 - RNA, 19 nt, Artificial Sequence
  Description of Artificial Sequence: Synthetic oligonucleotide
agcagugcaaccccucuuu

SEQ ID NO: 2326 - RNA, 19 nt, Artificial Sequence
  Description of Artificial Sequence: Synthetic oligonucleotide
gcagugcaaccccucuuug

SEQ ID NO: 2327 - RNA, 19 nt, Artificial Sequence
  Description of Artificial Sequence: Synthetic oligonucleotide
cagugcaaccccucuuugg

SEQ ID NO: 2328 - RNA, 19 nt, Artificial Sequence
  Description of Artificial Sequence: Synthetic oligonucleotide
agugcaaccccucuuuggc

SEQ ID NO: 2329 - RNA, 19 nt, Artificial Sequence
  Description of Artificial Sequence: Synthetic oligonucleotide
gugcaaccccucuuuggcc

SEQ ID NO: 2330 - RNA, 19 nt, Artificial Sequence
  Description of Artificial Sequence: Synthetic oligonucleotide
ugcaaccccucuuuggccc

SEQ ID NO: 2331 - RNA, 19 nt, Artificial Sequence
  Description of Artificial Sequence: Synthetic oligonucleotide
gcaaccccucuuuggccca

SEQ ID NO: 2332 - RNA, 19 nt, Artificial Sequence
  Description of Artificial Sequence: Synthetic oligonucleotide
caaccccucuuuggcccac

SEQ ID NO: 2333 - RNA, 19 nt, Artificial Sequence
  Description of Artificial Sequence: Synthetic oligonucleotide
aaccccucuuuggcccacg

SEQ ID NO: 2334 - RNA, 19 nt, Artificial Sequence
  Description of Artificial Sequence: Synthetic oligonucleotide
accccucuuuggcccacgg

SEQ ID NO: 2335 - RNA, 19 nt, Artificial Sequence
  Description of Artificial Sequence: Synthetic oligonucleotide
ccccucuuuggcccacggg

SEQ ID NO: 2336 - RNA, 19 nt, Artificial Sequence
  Description of Artificial Sequence: Synthetic oligonucleotide
cccucuuuggcccacgggc

SEQ ID NO: 2337 - RNA, 19 nt, Artificial Sequence
  Description of Artificial Sequence: Synthetic oligonucleotide
ccucuuuggcccacgggca

SEQ ID NO: 2338 - RNA, 19 nt, Artificial Sequence
  Description of Artificial Sequence: Synthetic oligonucleotide
cucuuuggcccacgggcag

SEQ ID NO: 2339 - RNA, 19 nt, Artificial Sequence
  Description of Artificial Sequence: Synthetic oligonucleotide
ucuuuggcccacgggcagg

SEQ ID NO: 2340 - RNA, 19 nt, Artificial Sequence
  Description of Artificial Sequence: Synthetic oligonucleotide
cuuuggcccacgggcagga

SEQ ID NO: 2341 - RNA, 19 nt, Artificial Sequence
  Description of Artificial Sequence: Synthetic oligonucleotide
uuuggcccacgggcaggag

SEQ ID NO: 2342 - RNA, 19 nt, Artificial Sequence
  Description of Artificial Sequence: Synthetic oligonucleotide
uuggcccacgggcaggagg

SEQ ID NO: 2343 - RNA, 19 nt, Artificial Sequence
  Description of Artificial Sequence: Synthetic oligonucleotide
uggcccacgggcaggaggc

SEQ ID NO: 2344 - RNA, 19 nt, Artificial Sequence
  Description of Artificial Sequence: Synthetic oligonucleotide
ggcccacgggcaggaggca

SEQ ID NO: 2345 - RNA, 19 nt, Artificial Sequence
  Description of Artificial Sequence: Synthetic oligonucleotide
gcccacgggcaggaggcac

SEQ ID NO: 2346 - RNA, 19 nt, Artificial Sequence
  Description of Artificial Sequence: Synthetic oligonucleotide
cccacgggcaggaggcacc

SEQ ID NO: 2347 - RNA, 19 nt, Artificial Sequence
  Description of Artificial Sequence: Synthetic oligonucleotide
ccacgggcaggaggcaccu

SEQ ID NO: 2348 - RNA, 19 nt, Artificial Sequence
  Description of Artificial Sequence: Synthetic oligonucleotide
cacgggcaggaggcaccug

SEQ ID NO: 2349 - RNA, 19 nt, Artificial Sequence
  Description of Artificial Sequence: Synthetic oligonucleotide
acgggcaggaggcaccugu

SEQ ID NO: 2350 - RNA, 19 nt, Artificial Sequence
  Description of Artificial Sequence: Synthetic oligonucleotide
cgggcaggaggcaccuguc

SEQ ID NO: 2351 - RNA, 19 nt, Artificial Sequence
  Description of Artificial Sequence: Synthetic oligonucleotide
gggcaggaggcaccugucu

SEQ ID NO: 2352 - RNA, 19 nt, Artificial Sequence
  Description of Artificial Sequence: Synthetic oligonucleotide
ggcaggaggcaccugucuc

SEQ ID NO: 2353 - RNA, 19 nt, Artificial Sequence
  Description of Artificial Sequence: Synthetic oligonucleotide
gcaggaggcaccugucuca

SEQ ID NO: 2354 - RNA, 19 nt, Artificial Sequence
  Description of Artificial Sequence: Synthetic oligonucleotide
caggaggcaccugucucac

SEQ ID NO: 2355 - RNA, 19 nt, Artificial Sequence
  Description of Artificial Sequence: Synthetic oligonucleotide
aggaggcaccugucucacu

SEQ ID NO: 2356 - RNA, 19 nt, Artificial Sequence
  Description of Artificial Sequence: Synthetic oligonucleotide
ggaggcaccugucucacuc

SEQ ID NO: 2357 - RNA, 19 nt, Artificial Sequence
  Description of Artificial Sequence: Synthetic oligonucleotide
gaggcaccugucucacucu

SEQ ID NO: 2358 - RNA, 19 nt, Artificial Sequence
  Description of Artificial Sequence: Synthetic oligonucleotide
aggcaccugucucacucuu

SEQ ID NO: 2359 - RNA, 19 nt, Artificial Sequence
  Description of Artificial Sequence: Synthetic oligonucleotide
ggcaccugucucacucuug

SEQ ID NO: 2360 - RNA, 19 nt, Artificial Sequence
  Description of Artificial Sequence: Synthetic oligonucleotide
gcaccugucucacucuuga

SEQ ID NO: 2361 - RNA, 19 nt, Artificial Sequence
  Description of Artificial Sequence: Synthetic oligonucleotide
caccugucucacucuugaa

SEQ ID NO: 2362 - RNA, 19 nt, Artificial Sequence
  Description of Artificial Sequence: Synthetic oligonucleotide
accugucucacucuugaag

SEQ ID NO: 2363 - RNA, 19 nt, Artificial Sequence
  Description of Artificial Sequence: Synthetic oligonucleotide
ccugucucacucuugaagg

SEQ ID NO: 2364 - RNA, 19 nt, Artificial Sequence
  Description of Artificial Sequence: Synthetic oligonucleotide
cugucucacucuugaaggc

SEQ ID NO: 2365 - RNA, 19 nt, Artificial Sequence
  Description of Artificial Sequence: Synthetic oligonucleotide
ugucucacucuugaaggcc

SEQ ID NO: 2366 - RNA, 19 nt, Artificial Sequence
  Description of Artificial Sequence: Synthetic oligonucleotide
gucucacucuugaaggcca

SEQ ID NO: 2367 - RNA, 19 nt, Artificial Sequence
  Description of Artificial Sequence: Synthetic oligonucleotide
ucucacucuugaaggccag

SEQ ID NO: 2368 - RNA, 19 nt, Artificial Sequence
  Description of Artificial Sequence: Synthetic oligonucleotide
cucacucuugaaggccaga

SEQ ID NO: 2369 - RNA, 19 nt, Artificial Sequence
  Description of Artificial Sequence: Synthetic oligonucleotide
ucacucuugaaggccagag

SEQ ID NO: 2370 - RNA, 19 nt, Artificial Sequence
  Description of Artificial Sequence: Synthetic oligonucleotide
cacucuugaaggccagagu

SEQ ID NO: 2371 - RNA, 19 nt, Artificial Sequence
  Description of Artificial Sequence: Synthetic oligonucleotide
acucuugaaggccagaguc

SEQ ID NO: 2372 - RNA, 19 nt, Artificial Sequence
  Description of Artificial Sequence: Synthetic oligonucleotide
cucuugaaggccagagucu

SEQ ID NO: 2373 - RNA, 19 nt, Artificial Sequence
  Description of Artificial Sequence: Synthetic oligonucleotide
ucuugaaggccagagucug

SEQ ID NO: 2374 - RNA, 19 nt, Artificial Sequence
  Description of Artificial Sequence: Synthetic oligonucleotide
cuugaaggccagagucugu

SEQ ID NO: 2375 - RNA, 19 nt, Artificial Sequence
  Description of Artificial Sequence: Synthetic oligonucleotide
uugaaggccagagucuguc

SEQ ID NO: 2376 - RNA, 19 nt, Artificial Sequence
  Description of Artificial Sequence: Synthetic oligonucleotide
ugaaggccagagucugucu

SEQ ID NO: 2377 - RNA, 19 nt, Artificial Sequence
  Description of Artificial Sequence: Synthetic oligonucleotide
gaaggccagagucugucug

SEQ ID NO: 2378 - RNA, 19 nt, Artificial Sequence
  Description of Artificial Sequence: Synthetic oligonucleotide
aaggccagagucugucugu

SEQ ID NO: 2379 - RNA, 19 nt, Artificial Sequence
  Description of Artificial Sequence: Synthetic oligonucleotide
aggccagagucugucugua

SEQ ID NO: 2380 - RNA, 19 nt, Artificial Sequence
  Description of Artificial Sequence: Synthetic oligonucleotide
ggccagagucugucuguag

SEQ ID NO: 2381 - RNA, 19 nt, Artificial Sequence
  Description of Artificial Sequence: Synthetic oligonucleotide
gccagagucugucuguagg

SEQ ID NO: 2382 - RNA, 19 nt, Artificial Sequence
  Description of Artificial Sequence: Synthetic oligonucleotide
ccagagucugucuguaggc

SEQ ID NO: 2383 - RNA, 19 nt, Artificial Sequence
  Description of Artificial Sequence: Synthetic oligonucleotide
cagagucugucuguaggca

SEQ ID NO: 2384 - RNA, 19 nt, Artificial Sequence
  Description of Artificial Sequence: Synthetic oligonucleotide
agagucugucuguaggcac

SEQ ID NO: 2385 - RNA, 19 nt, Artificial Sequence
  Description of Artificial Sequence: Synthetic oligonucleotide
gagucugucuguaggcacc

SEQ ID NO: 2386 - RNA, 19 nt, Artificial Sequence
  Description of Artificial Sequence: Synthetic oligonucleotide
agucugucuguaggcacca

SEQ ID NO: 2387 - RNA, 19 nt, Artificial Sequence
  Description of Artificial Sequence: Synthetic oligonucleotide
gucugucuguaggcaccag

SEQ ID NO: 2388 - RNA, 19 nt, Artificial Sequence
  Description of Artificial Sequence: Synthetic oligonucleotide
ucugucuguaggcaccagc

SEQ ID NO: 2389 - RNA, 19 nt, Artificial Sequence
  Description of Artificial Sequence: Synthetic oligonucleotide
cugucuguaggcaccagcc

SEQ ID NO: 2390 - RNA, 19 nt, Artificial Sequence
  Description of Artificial Sequence: Synthetic oligonucleotide
ugucuguaggcaccagccg

SEQ ID NO: 2391 - RNA, 19 nt, Artificial Sequence
  Description of Artificial Sequence: Synthetic oligonucleotide
gucuguaggcaccagccgg

SEQ ID NO: 2392 - RNA, 19 nt, Artificial Sequence
  Description of Artificial Sequence: Synthetic oligonucleotide
ucuguaggcaccagccggg

SEQ ID NO: 2393 - RNA, 19 nt, Artificial Sequence
  Description of Artificial Sequence: Synthetic oligonucleotide
cuguaggcaccagccgggc

SEQ ID NO: 2394 - RNA, 19 nt, Artificial Sequence
  Description of Artificial Sequence: Synthetic oligonucleotide
uguaggcaccagccgggcu

SEQ ID NO: 2395 - RNA, 19 nt, Artificial Sequence
  Description of Artificial Sequence: Synthetic oligonucleotide
guaggcaccagccgggcug

SEQ ID NO: 2396 - RNA, 19 nt, Artificial Sequence
  Description of Artificial Sequence: Synthetic oligonucleotide
uaggcaccagccgggcugu

SEQ ID NO: 2397 - RNA, 19 nt, Artificial Sequence
  Description of Artificial Sequence: Synthetic oligonucleotide
aggcaccagccgggcugug

SEQ ID NO: 2398 - RNA, 19 nt, Artificial Sequence
  Description of Artificial Sequence: Synthetic oligonucleotide
ggcaccagccgggcugugc

SEQ ID NO: 2399 - RNA, 19 nt, Artificial Sequence
  Description of Artificial Sequence: Synthetic oligonucleotide
gcaccagccgggcugugcu

SEQ ID NO: 2400 - RNA, 19 nt, Artificial Sequence
  Description of Artificial Sequence: Synthetic oligonucleotide
caccagccgggcugugcug

SEQ ID NO: 2401 - RNA, 19 nt, Artificial Sequence
  Description of Artificial Sequence: Synthetic oligonucleotide
accagccgggcugugcugg

SEQ ID NO: 2402 - RNA, 19 nt, Artificial Sequence
  Description of Artificial Sequence: Synthetic oligonucleotide
ccagccgggcugugcuggu

SEQ ID NO: 2403 - RNA, 19 nt, Artificial Sequence
  Description of Artificial Sequence: Synthetic oligonucleotide
cagccgggcugugcugguc

SEQ ID NO: 2404 - RNA, 19 nt, Artificial Sequence
  Description of Artificial Sequence: Synthetic oligonucleotide
agccgggcugugcugguca

SEQ ID NO: 2405 - RNA, 19 nt, Artificial Sequence
  Description of Artificial Sequence: Synthetic oligonucleotide
gccgggcugugcuggucaa

SEQ ID NO: 2406 - RNA, 19 nt, Artificial Sequence
  Description of Artificial Sequence: Synthetic oligonucleotide
ccgggcugugcuggucaau

SEQ ID NO: 2407 - RNA, 19 nt, Artificial Sequence
  Description of Artificial Sequence: Synthetic oligonucleotide
cgggcugugcuggucaaug

SEQ ID NO: 2408 - RNA, 19 nt, Artificial Sequence
  Description of Artificial Sequence: Synthetic oligonucleotide
gggcugugcuggucaaugg

SEQ ID NO: 2409 - RNA, 19 nt, Artificial Sequence
  Description of Artificial Sequence: Synthetic oligonucleotide
ggcugugcuggucaauggg

SEQ ID NO: 2410 - RNA, 19 nt, Artificial Sequence
  Description of Artificial Sequence: Synthetic oligonucleotide
gcugugcuggucaauggga

SEQ ID NO: 2411 - RNA, 19 nt, Artificial Sequence
  Description of Artificial Sequence: Synthetic oligonucleotide
cugugcuggucaaugggac

SEQ ID NO: 2412 - RNA, 19 nt, Artificial Sequence
  Description of Artificial Sequence: Synthetic oligonucleotide
ugugcuggucaaugggacu

SEQ ID NO: 2413 - RNA, 19 nt, Artificial Sequence
  Description of Artificial Sequence: Synthetic oligonucleotide
gugcuggucaaugggacug

SEQ ID NO: 2414 - RNA, 19 nt, Artificial Sequence
  Description of Artificial Sequence: Synthetic oligonucleotide
ugcuggucaaugggacuga

SEQ ID NO: 2415 - RNA, 19 nt, Artificial Sequence
  Description of Artificial Sequence: Synthetic oligonucleotide
gcuggucaaugggacugag

SEQ ID NO: 2416 - RNA, 19 nt, Artificial Sequence
  Description of Artificial Sequence: Synthetic oligonucleotide
cuggucaaugggacugagu

SEQ ID NO: 2417 - RNA, 19 nt, Artificial Sequence
  Description of Artificial Sequence: Synthetic oligonucleotide
uggucaaugggacugagug

SEQ ID NO: 2418 - RNA, 19 nt, Artificial Sequence
  Description of Artificial Sequence: Synthetic oligonucleotide
ggucaaugggacugagugu

SEQ ID NO: 2419 - RNA, 19 nt, Artificial Sequence
  Description of Artificial Sequence: Synthetic oligonucleotide
gucaaugggacugaguguc

SEQ ID NO: 2420 - RNA, 19 nt, Artificial Sequence
  Description of Artificial Sequence: Synthetic oligonucleotide
ucaaugggacugagugucu

SEQ ID NO: 2421 - RNA, 19 nt, Artificial Sequence
  Description of Artificial Sequence: Synthetic oligonucleotide
caaugggacugagugucug

SEQ ID NO: 2422 - RNA, 19 nt, Artificial Sequence
  Description of Artificial Sequence: Synthetic oligonucleotide
aaugggacugagugucugc

SEQ ID NO: 2423 - RNA, 19 nt, Artificial Sequence
  Description of Artificial Sequence: Synthetic oligonucleotide
augggacugagugucugcu

SEQ ID NO: 2424 - RNA, 19 nt, Artificial Sequence
  Description of Artificial Sequence: Synthetic oligonucleotide
ugggacugagugucugcua

SEQ ID NO: 2425 - RNA, 19 nt, Artificial Sequence
  Description of Artificial Sequence: Synthetic oligonucleotide
gggacugagugucugcuag

SEQ ID NO: 2426 - RNA, 19 nt, Artificial Sequence
  Description of Artificial Sequence: Synthetic oligonucleotide
ggacugagugucugcuagc

SEQ ID NO: 2427 - RNA, 19 nt, Artificial Sequence
  Description of Artificial Sequence: Synthetic oligonucleotide
gacugagugucugcuagca

SEQ ID NO: 2428 - RNA, 19 nt, Artificial Sequence
  Description of Artificial Sequence: Synthetic oligonucleotide
acugagugucugcuagcac

SEQ ID NO: 2429 - RNA, 19 nt, Artificial Sequence
  Description of Artificial Sequence: Synthetic oligonucleotide
cugagugucugcuagcacg

SEQ ID NO: 2430 - RNA, 19 nt, Artificial Sequence
  Description of Artificial Sequence: Synthetic oligonucleotide
ugagugucugcuagcacgg

SEQ ID NO: 2431 - RNA, 19 nt, Artificial Sequence
  Description of Artificial Sequence: Synthetic oligonucleotide
gagugucugcuagcacggg

SEQ ID NO: 2432 - RNA, 19 nt, Artificial Sequence
  Description of Artificial Sequence: Synthetic oligonucleotide
agugucugcuagcacgggu

SEQ ID NO: 2433 - RNA, 19 nt, Artificial Sequence
  Description of Artificial Sequence: Synthetic oligonucleotide
gugucugcuagcacggguc

SEQ ID NO: 2434 - RNA, 19 nt, Artificial Sequence
  Description of Artificial Sequence: Synthetic oligonucleotide
ugucugcuagcacggguca

SEQ ID NO: 2435 - RNA, 19 nt, Artificial Sequence
  Description of Artificial Sequence: Synthetic oligonucleotide
gucugcuagcacgggucag

SEQ ID NO: 2436 - RNA, 19 nt, Artificial Sequence
  Description of Artificial Sequence: Synthetic oligonucleotide
ucugcuagcacgggucagu

SEQ ID NO: 2437 - RNA, 19 nt, Artificial Sequence
  Description of Artificial Sequence: Synthetic oligonucleotide
cugcuagcacgggucagug

SEQ ID NO: 2438 - RNA, 19 nt, Artificial Sequence
  Description of Artificial Sequence: Synthetic oligonucleotide
ugcuagcacgggucaguga

SEQ ID NO: 2439 - RNA, 19 nt, Artificial Sequence
  Description of Artificial Sequence: Synthetic oligonucleotide
gcuagcacgggucagugag

SEQ ID NO: 2440 - RNA, 19 nt, Artificial Sequence
  Description of Artificial Sequence: Synthetic oligonucleotide
cuagcacgggucagugagg

SEQ ID NO: 2441 - RNA, 19 nt, Artificial Sequence
  Description of Artificial Sequence: Synthetic oligonucleotide
uagcacgggucagugaggg

SEQ ID NO: 2442 - RNA, 19 nt, Artificial Sequence
  Description of Artificial Sequence: Synthetic oligonucleotide
agcacgggucagugagggg

SEQ ID NO: 2443 - RNA, 19 nt, Artificial Sequence
  Description of Artificial Sequence: Synthetic oligonucleotide
gcacgggucagugaggggc

SEQ ID NO: 2444 - RNA, 19 nt, Artificial Sequence
  Description of Artificial Sequence: Synthetic oligonucleotide
cacgggucagugaggggca

SEQ ID NO: 2445 - RNA, 19 nt, Artificial Sequence
  Description of Artificial Sequence: Synthetic oligonucleotide
acgggucagugaggggcag

SEQ ID NO: 2446 - RNA, 19 nt, Artificial Sequence
  Description of Artificial Sequence: Synthetic oligonucleotide
cgggucagugaggggcagc

SEQ ID NO: 2447 - RNA, 19 nt, Artificial Sequence
  Description of Artificial Sequence: Synthetic oligonucleotide
gggucagugaggggcagcu

SEQ ID NO: 2448 - RNA, 19 nt, Artificial Sequence
  Description of Artificial Sequence: Synthetic oligonucleotide
ggucagugaggggcagcuu

SEQ ID NO: 2449 - RNA, 19 nt, Artificial Sequence
  Description of Artificial Sequence: Synthetic oligonucleotide
gucagugaggggcagcuuu

SEQ ID NO: 2450 - RNA, 19 nt, Artificial Sequence
  Description of Artificial Sequence: Synthetic oligonucleotide
ucagugaggggcagcuuuu

SEQ ID NO: 2451 - RNA, 19 nt, Artificial Sequence
  Description of Artificial Sequence: Synthetic oligonucleotide
cagugaggggcagcuuuua

SEQ ID NO: 2452 - RNA, 19 nt, Artificial Sequence
  Description of Artificial Sequence: Synthetic oligonucleotide
agugaggggcagcuuuuau

SEQ ID NO: 2453 - RNA, 19 nt, Artificial Sequence
  Description of Artificial Sequence: Synthetic oligonucleotide
gugaggggcagcuuuuaug

SEQ ID NO: 2454 - RNA, 19 nt, Artificial Sequence
  Description of Artificial Sequence: Synthetic oligonucleotide
ugaggggcagcuuuuaugu

SEQ ID NO: 2455 - RNA, 19 nt, Artificial Sequence
  Description of Artificial Sequence: Synthetic oligonucleotide
gaggggcagcuuuuaugug

SEQ ID NO: 2456 - RNA, 19 nt, Artificial Sequence
  Description of Artificial Sequence: Synthetic oligonucleotide
aggggcagcuuuuaugugc

SEQ ID NO: 2457 - RNA, 19 nt, Artificial Sequence
  Description of Artificial Sequence: Synthetic oligonucleotide
ggggcagcuuuuaugugcc

SEQ ID NO: 2458 - RNA, 19 nt, Artificial Sequence
  Description of Artificial Sequence: Synthetic oligonucleotide
gggcagcuuuuaugugcca

SEQ ID NO: 2459 - RNA, 19 nt, Artificial Sequence
  Description of Artificial Sequence: Synthetic oligonucleotide
ggcagcuuuuaugugccac

SEQ ID NO: 2460 - RNA, 19 nt, Artificial Sequence
  Description of Artificial Sequence: Synthetic oligonucleotide
gcagcuuuuaugugccaca

SEQ ID NO: 2461 - RNA, 19 nt, Artificial Sequence
  Description of Artificial Sequence: Synthetic oligonucleotide
cagcuuuuaugugccacac

SEQ ID NO: 2462 - RNA, 19 nt, Artificial Sequence
  Description of Artificial Sequence: Synthetic oligonucleotide
agcuuuuaugugccacacc

SEQ ID NO: 2463 - RNA, 19 nt, Artificial Sequence
  Description of Artificial Sequence: Synthetic oligonucleotide
gcuuuuaugugccacaccc

SEQ ID NO: 2464 - RNA, 19 nt, Artificial Sequence
  Description of Artificial Sequence: Synthetic oligonucleotide
cuuuuaugugccacacccc

SEQ ID NO: 2465 - RNA, 19 nt, Artificial Sequence
  Description of Artificial Sequence: Synthetic oligonucleotide
uuuuaugugccacaccccc

SEQ ID NO: 2466 - RNA, 19 nt, Artificial Sequence
  Description of Artificial Sequence: Synthetic oligonucleotide
uuuaugugccacacccccu

SEQ ID NO: 2467 - RNA, 19 nt, Artificial Sequence
  Description of Artificial Sequence: Synthetic oligonucleotide
uuaugugccacacccccug

SEQ ID NO: 2468 - RNA, 19 nt, Artificial Sequence
  Description of Artificial Sequence: Synthetic oligonucleotide
uaugugccacacccccugg

SEQ ID NO: 2469 - RNA, 19 nt, Artificial Sequence
  Description of Artificial Sequence: Synthetic oligonucleotide
augugccacacccccuggg

SEQ ID NO: 2470 - RNA, 19 nt, Artificial Sequence
  Description of Artificial Sequence: Synthetic oligonucleotide
ugugccacacccccugggg

SEQ ID NO: 2471 - RNA, 19 nt, Artificial Sequence
  Description of Artificial Sequence: Synthetic oligonucleotide
gugccacacccccuggggc

SEQ ID NO: 2472 - RNA, 19 nt, Artificial Sequence
  Description of Artificial Sequence: Synthetic oligonucleotide
ugccacacccccuggggcc

SEQ ID NO: 2473 - RNA, 19 nt, Artificial Sequence
  Description of Artificial Sequence: Synthetic oligonucleotide
gccacacccccuggggcca

SEQ ID NO: 2474 - RNA, 19 nt, Artificial Sequence
  Description of Artificial Sequence: Synthetic oligonucleotide
ccacacccccuggggccac

SEQ ID NO: 2475 - RNA, 19 nt, Artificial Sequence
  Description of Artificial Sequence: Synthetic oligonucleotide
cacacccccuggggccacg

SEQ ID NO: 2476 - RNA, 19 nt, Artificial Sequence
  Description of Artificial Sequence: Synthetic oligonucleotide
acacccccuggggccacgg

SEQ ID NO: 2477 - RNA, 19 nt, Artificial Sequence
  Description of Artificial Sequence: Synthetic oligonucleotide
cacccccuggggccacggu

SEQ ID NO: 2478 - RNA, 19 nt, Artificial Sequence
  Description of Artificial Sequence: Synthetic oligonucleotide
acccccuggggccacggug

SEQ ID NO: 2479 - RNA, 19 nt, Artificial Sequence
  Description of Artificial Sequence: Synthetic oligonucleotide
cccccuggggccacggugg

SEQ ID NO: 2480 - RNA, 19 nt, Artificial Sequence
  Description of Artificial Sequence: Synthetic oligonucleotide
ccccuggggccacgguggc

SEQ ID NO: 2481 - RNA, 19 nt, Artificial Sequence
  Description of Artificial Sequence: Synthetic oligonucleotide
cccuggggccacgguggcc

SEQ ID NO: 2482 - RNA, 19 nt, Artificial Sequence
  Description of Artificial Sequence: Synthetic oligonucleotide
ccuggggccacgguggcca

SEQ ID NO: 2483 - RNA, 19 nt, Artificial Sequence
  Description of Artificial Sequence: Synthetic oligonucleotide
cuggggccacgguggccag

SEQ ID NO: 2484 - RNA, 19 nt, Artificial Sequence
  Description of Artificial Sequence: Synthetic oligonucleotide
uggggccacgguggccagu

SEQ ID NO: 2485 - RNA, 19 nt, Artificial Sequence
  Description of Artificial Sequence: Synthetic oligonucleotide
ggggccacgguggccagug

SEQ ID NO: 2486 - RNA, 19 nt, Artificial Sequence
  Description of Artificial Sequence: Synthetic oligonucleotide
gggccacgguggccagugu

SEQ ID NO: 2487 - RNA, 19 nt, Artificial Sequence
  Description of Artificial Sequence: Synthetic oligonucleotide
ggccacgguggccaguguc

SEQ ID NO: 2488 - RNA, 19 nt, Artificial Sequence
  Description of Artificial Sequence: Synthetic oligonucleotide
gccacgguggccagugucc

SEQ ID NO: 2489 - RNA, 19 nt, Artificial Sequence
  Description of Artificial Sequence: Synthetic oligonucleotide
ccacgguggccaguguccc

SEQ ID NO: 2490 - RNA, 19 nt, Artificial Sequence
  Description of Artificial Sequence: Synthetic oligonucleotide
cacgguggccagugucccc

SEQ ID NO: 2491 - RNA, 19 nt, Artificial Sequence
  Description of Artificial Sequence: Synthetic oligonucleotide
acgguggccaguguccccc

SEQ ID NO: 2492 - RNA, 19 nt, Artificial Sequence
  Description of Artificial Sequence: Synthetic oligonucleotide
cgguggccagugucccccu

SEQ ID NO: 2493 - RNA, 19 nt, Artificial Sequence
  Description of Artificial Sequence: Synthetic oligonucleotide
gguggccagugucccccuu

SEQ ID NO: 2494 - RNA, 19 nt, Artificial Sequence
  Description of Artificial Sequence: Synthetic oligonucleotide
guggccagugucccccuua

SEQ ID NO: 2495 - RNA, 19 nt, Artificial Sequence
  Description of Artificial Sequence: Synthetic oligonucleotide
uggccagugucccccuuag

SEQ ID NO: 2496 - RNA, 19 nt, Artificial Sequence
  Description of Artificial Sequence: Synthetic oligonucleotide
ggccagugucccccuuagc

SEQ ID NO: 2497 - RNA, 19 nt, Artificial Sequence
  Description of Artificial Sequence: Synthetic oligonucleotide
gccagugucccccuuagcc

SEQ ID NO: 2498 - RNA, 19 nt, Artificial Sequence
  Description of Artificial Sequence: Synthetic oligonucleotide
ccagugucccccuuagccu

SEQ ID NO: 2499 - RNA, 19 nt, Artificial Sequence
  Description of Artificial Sequence: Synthetic oligonucleotide
cagugucccccuuagccug

SEQ ID NO: 2500 - RNA, 19 nt, Artificial Sequence
  Description of Artificial Sequence: Synthetic oligonucleotide
agugucccccuuagccugc

SEQ ID NO: 2501 - RNA, 19 nt, Artificial Sequence
  Description of Artificial Sequence: Synthetic oligonucleotide
gugucccccuuagccugca

SEQ ID NO: 2502 - RNA, 19 nt, Artificial Sequence
  Description of Artificial Sequence: Synthetic oligonucleotide
ugucccccuuagccugcag

SEQ ID NO: 2503 - RNA, 19 nt, Artificial Sequence
  Description of Artificial Sequence: Synthetic oligonucleotide
gucccccuuagccugcagg

SEQ ID NO: 2504 - RNA, 19 nt, Artificial Sequence
  Description of Artificial Sequence: Synthetic oligonucleotide
ucccccuuagccugcaggu

SEQ ID NO: 2505 - RNA, 19 nt, Artificial Sequence
  Description of Artificial Sequence: Synthetic oligonucleotide
cccccuuagccugcaggug

SEQ ID NO: 2506 - RNA, 19 nt, Artificial Sequence
  Description of Artificial Sequence: Synthetic oligonucleotide
ccccuuagccugcaggugg

SEQ ID NO: 2507 - RNA, 19 nt, Artificial Sequence
  Description of Artificial Sequence: Synthetic oligonucleotide
cccuuagccugcagguggg

SEQ ID NO: 2508 - RNA, 19 nt, Artificial Sequence
  Description of Artificial Sequence: Synthetic oligonucleotide
ccuuagccugcaggugggg

SEQ ID NO: 2509 - RNA, 19 nt, Artificial Sequence
  Description of Artificial Sequence: Synthetic oligonucleotide
cuuagccugcagguggggg

SEQ ID NO: 2510 - RNA, 19 nt, Artificial Sequence
  Description of Artificial Sequence: Synthetic oligonucleotide
uuagccugcaggugggggg

SEQ ID NO: 2511 - RNA, 19 nt, Artificial Sequence
  Description of Artificial Sequence: Synthetic oligonucleotide
uagccugcagguggggggu

SEQ ID NO: 2512 - RNA, 19 nt, Artificial Sequence
  Description of Artificial Sequence: Synthetic oligonucleotide
agccugcagguggggggug

SEQ ID NO: 2513 - RNA, 19 nt, Artificial Sequence
  Description of Artificial Sequence: Synthetic oligonucleotide
gccugcagguggggggugc

SEQ ID NO: 2514 - RNA, 19 nt, Artificial Sequence
  Description of Artificial Sequence: Synthetic oligonucleotide
ccugcagguggggggugcc

SEQ ID NO: 2515 - RNA, 19 nt, Artificial Sequence
  Description of Artificial Sequence: Synthetic oligonucleotide
cugcagguggggggugccc

SEQ ID NO: 2516 - RNA, 19 nt, Artificial Sequence
  Description of Artificial Sequence: Synthetic oligonucleotide
ugcagguggggggugccca

SEQ ID NO: 2517 - RNA, 19 nt, Artificial Sequence
  Description of Artificial Sequence: Synthetic oligonucleotide
gcagguggggggugcccag

SEQ ID NO: 2518 - RNA, 19 nt, Artificial Sequence
  Description of Artificial Sequence: Synthetic oligonucleotide
cagguggggggugcccagg

SEQ ID NO: 2519 - RNA, 19 nt, Artificial Sequence
  Description of Artificial Sequence: Synthetic oligonucleotide
agguggggggugcccaggu

SEQ ID NO: 2520 - RNA, 19 nt, Artificial Sequence
  Description of Artificial Sequence: Synthetic oligonucleotide
gguggggggugcccaggua

SEQ ID NO: 2521 - RNA, 19 nt, Artificial Sequence
  Description of Artificial Sequence: Synthetic oligonucleotide
guggggggugcccagguac

SEQ ID NO: 2522 - RNA, 19 nt, Artificial Sequence
  Description of Artificial Sequence: Synthetic oligonucleotide
uggggggugcccagguacc

SEQ ID NO: 2523 - RNA, 19 nt, Artificial Sequence
  Description of Artificial Sequence: Synthetic oligonucleotide
ggggggugcccagguaccu

SEQ ID NO: 2524 - RNA, 19 nt, Artificial Sequence
  Description of Artificial Sequence: Synthetic oligonucleotide
gggggugcccagguaccug

SEQ ID NO: 2525 - RNA, 19 nt, Artificial Sequence
  Description of Artificial Sequence: Synthetic oligonucleotide
ggggugcccagguaccugg

SEQ ID NO: 2526 - RNA, 19 nt, Artificial Sequence
  Description of Artificial Sequence: Synthetic oligonucleotide
gggugcccagguaccuggu

SEQ ID NO: 2527 - RNA, 19 nt, Artificial Sequence
  Description of Artificial Sequence: Synthetic oligonucleotide
ggugcccagguaccugguu

SEQ ID NO: 2528 - RNA, 19 nt, Artificial Sequence
  Description of Artificial Sequence: Synthetic oligonucleotide
gugcccagguaccugguuc

SEQ ID NO: 2529 - RNA, 19 nt, Artificial Sequence
  Description of Artificial Sequence: Synthetic oligonucleotide
ugcccagguaccugguucc

SEQ ID NO: 2530 - RNA, 19 nt, Artificial Sequence
  Description of Artificial Sequence: Synthetic oligonucleotide
gcccagguaccugguuccu

SEQ ID NO: 2531 - RNA, 19 nt, Artificial Sequence
  Description of Artificial Sequence: Synthetic oligonucleotide
cccagguaccugguuccug

SEQ ID NO: 2532 - RNA, 19 nt, Artificial Sequence
  Description of Artificial Sequence: Synthetic oligonucleotide
ccagguaccugguuccugg

SEQ ID NO: 2533 - RNA, 19 nt, Artificial Sequence
  Description of Artificial Sequence: Synthetic oligonucleotide
cagguaccugguuccugga

SEQ ID NO: 2534 - RNA, 19 nt, Artificial Sequence
  Description of Artificial Sequence: Synthetic oligonucleotide
agguaccugguuccuggac

SEQ ID NO: 2535 - RNA, 19 nt, Artificial Sequence
  Description of Artificial Sequence: Synthetic oligonucleotide
gguaccugguuccuggacc

SEQ ID NO: 2536 - RNA, 19 nt, Artificial Sequence
  Description of Artificial Sequence: Synthetic oligonucleotide
guaccugguuccuggaccu

SEQ ID NO: 2537 - RNA, 19 nt, Artificial Sequence
  Description of Artificial Sequence: Synthetic oligonucleotide
uaccugguuccuggaccuu

SEQ ID NO: 2538 - RNA, 19 nt, Artificial Sequence
  Description of Artificial Sequence: Synthetic oligonucleotide
accugguuccuggaccuuc

SEQ ID NO: 2539 - RNA, 19 nt, Artificial Sequence
  Description of Artificial Sequence: Synthetic oligonucleotide
ccugguuccuggaccuucc

SEQ ID NO: 2540 - RNA, 19 nt, Artificial Sequence
  Description of Artificial Sequence: Synthetic oligonucleotide
cugguuccuggaccuucca

SEQ ID NO: 2541 - RNA, 19 nt, Artificial Sequence
  Description of Artificial Sequence: Synthetic oligonucleotide
ugguuccuggaccuuccag

SEQ ID NO: 2542 - RNA, 19 nt, Artificial Sequence
  Description of Artificial Sequence: Synthetic oligonucleotide
gguuccuggaccuuccagu

SEQ ID NO: 2543 - RNA, 19 nt, Artificial Sequence
  Description of Artificial Sequence: Synthetic oligonucleotide
guuccuggaccuuccagua

SEQ ID NO: 2544 - RNA, 19 nt, Artificial Sequence
  Description of Artificial Sequence: Synthetic oligonucleotide
uuccuggaccuuccaguac

SEQ ID NO: 2545 - RNA, 19 nt, Artificial Sequence
  Description of Artificial Sequence: Synthetic oligonucleotide
uccuggaccuuccaguaca

SEQ ID NO: 2546 - RNA, 19 nt, Artificial Sequence
  Description of Artificial Sequence: Synthetic oligonucleotide
ccuggaccuuccaguacag

SEQ ID NO: 2547 - RNA, 19 nt, Artificial Sequence
  Description of Artificial Sequence: Synthetic oligonucleotide
cuggaccuuccaguacaga

SEQ ID NO: 2548 - RNA, 19 nt, Artificial Sequence
  Description of Artificial Sequence: Synthetic oligonucleotide
uggaccuuccaguacagag

SEQ ID NO: 2549 - RNA, 19 nt, Artificial Sequence
  Description of Artificial Sequence: Synthetic oligonucleotide
ggaccuuccaguacagaga

SEQ ID NO: 2550 - RNA, 19 nt, Artificial Sequence
  Description of Artificial Sequence: Synthetic oligonucleotide
gaccuuccaguacagagaa

SEQ ID NO: 2551 - RNA, 19 nt, Artificial Sequence
  Description of Artificial Sequence: Synthetic oligonucleotide
accuuccaguacagagaag

SEQ ID NO: 2552 - RNA, 19 nt, Artificial Sequence
  Description of Artificial Sequence: Synthetic oligonucleotide
ccuuccaguacagagaaga

SEQ ID NO: 2553 - RNA, 19 nt, Artificial Sequence
  Description of Artificial Sequence: Synthetic oligonucleotide
cuuccaguacagagaagac

SEQ ID NO: 2554 - RNA, 19 nt, Artificial Sequence
  Description of Artificial Sequence: Synthetic oligonucleotide
uuccaguacagagaagacc

SEQ ID NO: 2555 - RNA, 19 nt, Artificial Sequence
  Description of Artificial Sequence: Synthetic oligonucleotide
uccaguacagagaagaccc

SEQ ID NO: 2556 - RNA, 19 nt, Artificial Sequence
  Description of Artificial Sequence: Synthetic oligonucleotide
ccaguacagagaagacccu

SEQ ID NO: 2557 - RNA, 19 nt, Artificial Sequence
  Description of Artificial Sequence: Synthetic oligonucleotide
caguacagagaagacccug

SEQ ID NO: 2558 - RNA, 19 nt, Artificial Sequence
  Description of Artificial Sequence: Synthetic oligonucleotide
aguacagagaagacccugu

SEQ ID NO: 2559 - RNA, 19 nt, Artificial Sequence
  Description of Artificial Sequence: Synthetic oligonucleotide
guacagagaagacccuguc

SEQ ID NO: 2560 - RNA, 19 nt, Artificial Sequence
  Description of Artificial Sequence: Synthetic oligonucleotide
uacagagaagacccugucg

SEQ ID NO: 2561 - RNA, 19 nt, Artificial Sequence
  Description of Artificial Sequence: Synthetic oligonucleotide
acagagaagacccugucgu

SEQ ID NO: 2562 - RNA, 19 nt, Artificial Sequence
  Description of Artificial Sequence: Synthetic oligonucleotide
cagagaagacccugucgug

SEQ ID NO: 2563 - RNA, 19 nt, Artificial Sequence
  Description of Artificial Sequence: Synthetic oligonucleotide
agagaagacccugucgugc

SEQ ID NO: 2564 - RNA, 19 nt, Artificial Sequence
  Description of Artificial Sequence: Synthetic oligonucleotide
gagaagacccugucgugcu

SEQ ID NO: 2565 - RNA, 19 nt, Artificial Sequence
  Description of Artificial Sequence: Synthetic oligonucleotide
agaagacccugucgugcua

SEQ ID NO: 2566 - RNA, 19 nt, Artificial Sequence
  Description of Artificial Sequence: Synthetic oligonucleotide
gaagacccugucgugcuaa

SEQ ID NO: 2567 - RNA, 19 nt, Artificial Sequence
  Description of Artificial Sequence: Synthetic oligonucleotide
aagacccugucgugcuaag

SEQ ID NO: 2568 - RNA, 19 nt, Artificial Sequence
  Description of Artificial Sequence: Synthetic oligonucleotide
agacccugucgugcuaagc

SEQ ID NO: 2569 - RNA, 19 nt, Artificial Sequence
  Description of Artificial Sequence: Synthetic oligonucleotide
gacccugucgugcuaagca

SEQ ID NO: 2570 - RNA, 19 nt, Artificial Sequence
  Description of Artificial Sequence: Synthetic oligonucleotide
acccugucgugcuaagcau

SEQ ID NO: 2571 - RNA, 19 nt, Artificial Sequence
  Description of Artificial Sequence: Synthetic oligonucleotide
cccugucgugcuaagcauc

SEQ ID NO: 2572 - RNA, 19 nt, Artificial Sequence
  Description of Artificial Sequence: Synthetic oligonucleotide
ccugucgugcuaagcauca

SEQ ID NO: 2573 - RNA, 19 nt, Artificial Sequence
  Description of Artificial Sequence: Synthetic oligonucleotide
cugucgugcuaagcaucag

SEQ ID NO: 2574 - RNA, 19 nt, Artificial Sequence
  Description of Artificial Sequence: Synthetic oligonucleotide
ugucgugcuaagcaucagc

SEQ ID NO: 2575 - RNA, 19 nt, Artificial Sequence
  Description of Artificial Sequence: Synthetic oligonucleotide
gucgugcuaagcaucagcc

SEQ ID NO: 2576 - RNA, 19 nt, Artificial Sequence
  Description of Artificial Sequence: Synthetic oligonucleotide
ucgugcuaagcaucagccc

SEQ ID NO: 2577 - RNA, 19 nt, Artificial Sequence
  Description of Artificial Sequence: Synthetic oligonucleotide
cgugcuaagcaucagcccc

SEQ ID NO: 2578 - RNA, 19 nt, Artificial Sequence
  Description of Artificial Sequence: Synthetic oligonucleotide
gugcuaagcaucagcccca

SEQ ID NO: 2579 - RNA, 19 nt, Artificial Sequence
  Description of Artificial Sequence: Synthetic oligonucleotide
ugcuaagcaucagccccaa

SEQ ID NO: 2580 - RNA, 19 nt, Artificial Sequence
  Description of Artificial Sequence: Synthetic oligonucleotide
gcuaagcaucagccccaac

SEQ ID NO: 2581 - RNA, 19 nt, Artificial Sequence
  Description of Artificial Sequence: Synthetic oligonucleotide
cuaagcaucagccccaacu

SEQ ID NO: 2582 - RNA, 19 nt, Artificial Sequence
  Description of Artificial Sequence: Synthetic oligonucleotide
uaagcaucagccccaacug

SEQ ID NO: 2583 - RNA, 19 nt, Artificial Sequence
  Description of Artificial Sequence: Synthetic oligonucleotide
aagcaucagccccaacugu

SEQ ID NO: 2584 - RNA, 19 nt, Artificial Sequence
  Description of Artificial Sequence: Synthetic oligonucleotide
agcaucagccccaacugug

SEQ ID NO: 2585 - RNA, 19 nt, Artificial Sequence
  Description of Artificial Sequence: Synthetic oligonucleotide
gcaucagccccaacugugg

SEQ ID NO: 2586 - RNA, 19 nt, Artificial Sequence
  Description of Artificial Sequence: Synthetic oligonucleotide
caucagccccaacuguggc

SEQ ID NO: 2587 - RNA, 19 nt, Artificial Sequence
  Description of Artificial Sequence: Synthetic oligonucleotide
aucagccccaacuguggcu

SEQ ID NO: 2588 - RNA, 19 nt, Artificial Sequence
  Description of Artificial Sequence: Synthetic oligonucleotide
ucagccccaacuguggcua

SEQ ID NO: 2589 - RNA, 19 nt, Artificial Sequence
  Description of Artificial Sequence: Synthetic oligonucleotide
cagccccaacuguggcuac

SEQ ID NO: 2590 - RNA, 19 nt, Artificial Sequence
  Description of Artificial Sequence: Synthetic oligonucleotide
agccccaacuguggcuaca

SEQ ID NO: 2591 - RNA, 19 nt, Artificial Sequence
  Description of Artificial Sequence: Synthetic oligonucleotide
gccccaacuguggcuacau

SEQ ID NO: 2592 - RNA, 19 nt, Artificial Sequence
  Description of Artificial Sequence: Synthetic oligonucleotide
ccccaacuguggcuacauc

SEQ ID NO: 2593 - RNA, 19 nt, Artificial Sequence
  Description of Artificial Sequence: Synthetic oligonucleotide
cccaacuguggcuacauca

SEQ ID NO: 2594 - RNA, 19 nt, Artificial Sequence
  Description of Artificial Sequence: Synthetic oligonucleotide
ccaacuguggcuacaucaa

SEQ ID NO: 2595 - RNA, 19 nt, Artificial Sequence
  Description of Artificial Sequence: Synthetic oligonucleotide
caacuguggcuacaucaac

SEQ ID NO: 2596 - RNA, 19 nt, Artificial Sequence
  Description of Artificial Sequence: Synthetic oligonucleotide
aacuguggcuacaucaacu

SEQ ID NO: 2597 - RNA, 19 nt, Artificial Sequence
  Description of Artificial Sequence: Synthetic oligonucleotide
acuguggcuacaucaacuc

SEQ ID NO: 2598 - RNA, 19 nt, Artificial Sequence
  Description of Artificial Sequence: Synthetic oligonucleotide
cuguggcuacaucaacucc

SEQ ID NO: 2599 - RNA, 19 nt, Artificial Sequence
  Description of Artificial Sequence: Synthetic oligonucleotide
uguggcuacaucaacuccc

SEQ ID NO: 2600 - RNA, 19 nt, Artificial Sequence
  Description of Artificial Sequence: Synthetic oligonucleotide
guggcuacaucaacuccca

SEQ ID NO: 2601 - RNA, 19 nt, Artificial Sequence
  Description of Artificial Sequence: Synthetic oligonucleotide
uggcuacaucaacucccac

SEQ ID NO: 2602 - RNA, 19 nt, Artificial Sequence
  Description of Artificial Sequence: Synthetic oligonucleotide
ggcuacaucaacucccaca

SEQ ID NO: 2603 - RNA, 19 nt, Artificial Sequence
  Description of Artificial Sequence: Synthetic oligonucleotide
gcuacaucaacucccacau

SEQ ID NO: 2604 - RNA, 19 nt, Artificial Sequence
  Description of Artificial Sequence: Synthetic oligonucleotide
cuacaucaacucccacauc

SEQ ID NO: 2605 - RNA, 19 nt, Artificial Sequence
  Description of Artificial Sequence: Synthetic oligonucleotide
uacaucaacucccacauca

SEQ ID NO: 2606 - RNA, 19 nt, Artificial Sequence
  Description of Artificial Sequence: Synthetic oligonucleotide
acaucaacucccacaucac

SEQ ID NO: 2607 - RNA, 19 nt, Artificial Sequence
  Description of Artificial Sequence: Synthetic oligonucleotide
caucaacucccacaucacc

SEQ ID NO: 2608 - RNA, 19 nt, Artificial Sequence
  Description of Artificial Sequence: Synthetic oligonucleotide
aucaacucccacaucacca

SEQ ID NO: 2609 - RNA, 19 nt, Artificial Sequence
  Description of Artificial Sequence: Synthetic oligonucleotide
ucaacucccacaucaccau

SEQ ID NO: 2610 - RNA, 19 nt, Artificial Sequence
  Description of Artificial Sequence: Synthetic oligonucleotide
caacucccacaucaccauc

SEQ ID NO: 2611 - RNA, 19 nt, Artificial Sequence
  Description of Artificial Sequence: Synthetic oligonucleotide
aacucccacaucaccaucu

SEQ ID NO: 2612 - RNA, 19 nt, Artificial Sequence
  Description of Artificial Sequence: Synthetic oligonucleotide
acucccacaucaccaucug

SEQ ID NO: 2613 - RNA, 19 nt, Artificial Sequence
  Description of Artificial Sequence: Synthetic oligonucleotide
cucccacaucaccaucugu

SEQ ID NO: 2614 - RNA, 19 nt, Artificial Sequence
  Description of Artificial Sequence: Synthetic oligonucleotide
ucccacaucaccaucugug

SEQ ID NO: 2615 - RNA, 19 nt, Artificial Sequence
  Description of Artificial Sequence: Synthetic oligonucleotide
cccacaucaccaucugugg

SEQ ID NO: 2616 - RNA, 19 nt, Artificial Sequence
  Description of Artificial Sequence: Synthetic oligonucleotide
ccacaucaccaucuguggc

SEQ ID NO: 2617 - RNA, 19 nt, Artificial Sequence
  Description of Artificial Sequence: Synthetic oligonucleotide
cacaucaccaucuguggcc

SEQ ID NO: 2618 - RNA, 19 nt, Artificial Sequence
  Description of Artificial Sequence: Synthetic oligonucleotide
acaucaccaucuguggcca

SEQ ID NO: 2619 - RNA, 19 nt, Artificial Sequence
  Description of Artificial Sequence: Synthetic oligonucleotide
caucaccaucuguggccag

SEQ ID NO: 2620 - RNA, 19 nt, Artificial Sequence
  Description of Artificial Sequence: Synthetic oligonucleotide
aucaccaucuguggccagc

SEQ ID NO: 2621 - RNA, 19 nt, Artificial Sequence
  Description of Artificial Sequence: Synthetic oligonucleotide
ucaccaucuguggccagca

SEQ ID NO: 2622 - RNA, 19 nt, Artificial Sequence
  Description of Artificial Sequence: Synthetic oligonucleotide
caccaucuguggccagcau

SEQ ID NO: 2623 - RNA, 19 nt, Artificial Sequence
  Description of Artificial Sequence: Synthetic oligonucleotide
accaucuguggccagcauc

SEQ ID NO: 2624 - RNA, 19 nt, Artificial Sequence
  Description of Artificial Sequence: Synthetic oligonucleotide
ccaucuguggccagcaucu

SEQ ID NO: 2625 - RNA, 19 nt, Artificial Sequence
  Description of Artificial Sequence: Synthetic oligonucleotide
caucuguggccagcaucua

SEQ ID NO: 2626 - RNA, 19 nt, Artificial Sequence
  Description of Artificial Sequence: Synthetic oligonucleotide
aucuguggccagcaucuaa

SEQ ID NO: 2627 - RNA, 19 nt, Artificial Sequence
  Description of Artificial Sequence: Synthetic oligonucleotide
ucuguggccagcaucuaac

SEQ ID NO: 2628 - RNA, 19 nt, Artificial Sequence
  Description of Artificial Sequence: Synthetic oligonucleotide
cuguggccagcaucuaacu

SEQ ID NO: 2629 - RNA, 19 nt, Artificial Sequence
  Description of Artificial Sequence: Synthetic oligonucleotide
uguggccagcaucuaacuu

SEQ ID NO: 2630 - RNA, 19 nt, Artificial Sequence
  Description of Artificial Sequence: Synthetic oligonucleotide
guggccagcaucuaacuuc

SEQ ID NO: 2631 - RNA, 19 nt, Artificial Sequence
  Description of Artificial Sequence: Synthetic oligonucleotide
uggccagcaucuaacuuca

SEQ ID NO: 2632 - RNA, 19 nt, Artificial Sequence
  Description of Artificial Sequence: Synthetic oligonucleotide
ggccagcaucuaacuucag

SEQ ID NO: 2633 - RNA, 19 nt, Artificial Sequence
  Description of Artificial Sequence: Synthetic oligonucleotide
gccagcaucuaacuucagc

SEQ ID NO: 2634 - RNA, 19 nt, Artificial Sequence
  Description of Artificial Sequence: Synthetic oligonucleotide
ccagcaucuaacuucagca

SEQ ID NO: 2635 - RNA, 19 nt, Artificial Sequence
  Description of Artificial Sequence: Synthetic oligonucleotide
cagcaucuaacuucagcau

SEQ ID NO: 2636 - RNA, 19 nt, Artificial Sequence
  Description of Artificial Sequence: Synthetic oligonucleotide
agcaucuaacuucagcaug

SEQ ID NO: 2637 - RNA, 19 nt, Artificial Sequence
  Description of Artificial Sequence: Synthetic oligonucleotide
gcaucuaacuucagcaugg

SEQ ID NO: 2638 - RNA, 19 nt, Artificial Sequence
  Description of Artificial Sequence: Synthetic oligonucleotide
caucuaacuucagcauggc

SEQ ID NO: 2639 - RNA, 19 nt, Artificial Sequence
  Description of Artificial Sequence: Synthetic oligonucleotide
aucuaacuucagcauggca

SEQ ID NO: 2640 - RNA, 19 nt, Artificial Sequence
  Description of Artificial Sequence: Synthetic oligonucleotide
ucuaacuucagcauggcac

SEQ ID NO: 2641 - RNA, 19 nt, Artificial Sequence
  Description of Artificial Sequence: Synthetic oligonucleotide
cuaacuucagcauggcacu

SEQ ID NO: 2642 - RNA, 19 nt, Artificial Sequence
  Description of Artificial Sequence: Synthetic oligonucleotide
uaacuucagcauggcacuu

SEQ ID NO: 2643 - RNA, 19 nt, Artificial Sequence
  Description of Artificial Sequence: Synthetic oligonucleotide
aacuucagcauggcacuua

SEQ ID NO: 2644 - RNA, 19 nt, Artificial Sequence
  Description of Artificial Sequence: Synthetic oligonucleotide
acuucagcauggcacuuag

SEQ ID NO: 2645 - RNA, 19 nt, Artificial Sequence
  Description of Artificial Sequence: Synthetic oligonucleotide
cuucagcauggcacuuagu

SEQ ID NO: 2646 - RNA, 19 nt, Artificial Sequence
  Description of Artificial Sequence: Synthetic oligonucleotide
uucagcauggcacuuagug

SEQ ID NO: 2647 - RNA, 19 nt, Artificial Sequence
  Description of Artificial Sequence: Synthetic oligonucleotide
ucagcauggcacuuagugc

SEQ ID NO: 2648 - RNA, 19 nt, Artificial Sequence
  Description of Artificial Sequence: Synthetic oligonucleotide
cagcauggcacuuagugcu

SEQ ID NO: 2649 - RNA, 19 nt, Artificial Sequence
  Description of Artificial Sequence: Synthetic oligonucleotide
agcauggcacuuagugcug

SEQ ID NO: 2650 - RNA, 19 nt, Artificial Sequence
  Description of Artificial Sequence: Synthetic oligonucleotide
gcauggcacuuagugcugu

SEQ ID NO: 2651 - RNA, 19 nt, Artificial Sequence
  Description of Artificial Sequence: Synthetic oligonucleotide
cauggcacuuagugcuguc

SEQ ID NO: 2652 - RNA, 19 nt, Artificial Sequence
  Description of Artificial Sequence: Synthetic oligonucleotide
auggcacuuagugcuguca

SEQ ID NO: 2653 - RNA, 19 nt, Artificial Sequence
  Description of Artificial Sequence: Synthetic oligonucleotide
uggcacuuagugcugucau

SEQ ID NO: 2654 - RNA, 19 nt, Artificial Sequence
  Description of Artificial Sequence: Synthetic oligonucleotide
ggcacuuagugcugucauu

SEQ ID NO: 2655 - RNA, 19 nt, Artificial Sequence
  Description of Artificial Sequence: Synthetic oligonucleotide
gcacuuagugcugucauuc

SEQ ID NO: 2656 - RNA, 19 nt, Artificial Sequence
  Description of Artificial Sequence: Synthetic oligonucleotide
cacuuagugcugucauucc

SEQ ID NO: 2657 - RNA, 19 nt, Artificial Sequence
  Description of Artificial Sequence: Synthetic oligonucleotide
acuuagugcugucauucca

SEQ ID NO: 2658 - RNA, 19 nt, Artificial Sequence
  Description of Artificial Sequence: Synthetic oligonucleotide
cuuagugcugucauuccau

SEQ ID NO: 2659 - RNA, 19 nt, Artificial Sequence
  Description of Artificial Sequence: Synthetic oligonucleotide
uuagugcugucauuccaug

SEQ ID NO: 2660 - RNA, 19 nt, Artificial Sequence
  Description of Artificial Sequence: Synthetic oligonucleotide
uagugcugucauuccauga

SEQ ID NO: 2661 - RNA, 19 nt, Artificial Sequence
  Description of Artificial Sequence: Synthetic oligonucleotide
agugcugucauuccaugac

SEQ ID NO: 2662 - RNA, 19 nt, Artificial Sequence
  Description of Artificial Sequence: Synthetic oligonucleotide
gugcugucauuccaugacg

SEQ ID NO: 2663 - RNA, 19 nt, Artificial Sequence
  Description of Artificial Sequence: Synthetic oligonucleotide
ugcugucauuccaugacgg

SEQ ID NO: 2664 - RNA, 19 nt, Artificial Sequence
  Description of Artificial Sequence: Synthetic oligonucleotide
gcugucauuccaugacggg

SEQ ID NO: 2665 - RNA, 19 nt, Artificial Sequence
  Description of Artificial Sequence: Synthetic oligonucleotide
cugucauuccaugacgggc

SEQ ID NO: 2666 - RNA, 19 nt, Artificial Sequence
  Description of Artificial Sequence: Synthetic oligonucleotide
ugucauuccaugacgggcu

SEQ ID NO: 2667 - RNA, 19 nt, Artificial Sequence
  Description of Artificial Sequence: Synthetic oligonucleotide
gucauuccaugacgggcuu

SEQ ID NO: 2668 - RNA, 19 nt, Artificial Sequence
  Description of Artificial Sequence: Synthetic oligonucleotide
ucauuccaugacgggcuua

SEQ ID NO: 2669 - RNA, 19 nt, Artificial Sequence
  Description of Artificial Sequence: Synthetic oligonucleotide
cauuccaugacgggcuuag

SEQ ID NO: 2670 - RNA, 19 nt, Artificial Sequence
  Description of Artificial Sequence: Synthetic oligonucleotide
auuccaugacgggcuuagg

SEQ ID NO: 2671 - RNA, 19 nt, Artificial Sequence
  Description of Artificial Sequence: Synthetic oligonucleotide
uuccaugacgggcuuaggg

SEQ ID NO: 2672 - RNA, 19 nt, Artificial Sequence
  Description of Artificial Sequence: Synthetic oligonucleotide
uccaugacgggcuuagggc

SEQ ID NO: 2673 - RNA, 19 nt, Artificial Sequence
  Description of Artificial Sequence: Synthetic oligonucleotide
ccaugacgggcuuagggca

SEQ ID NO: 2674 - RNA, 19 nt, Artificial Sequence
  Description of Artificial Sequence: Synthetic oligonucleotide
caugacgggcuuagggcag

SEQ ID NO: 2675 - RNA, 19 nt, Artificial Sequence
  Description of Artificial Sequence: Synthetic oligonucleotide
augacgggcuuagggcagu

SEQ ID NO: 2676 - RNA, 19 nt, Artificial Sequence
  Description of Artificial Sequence: Synthetic oligonucleotide
ugacgggcuuagggcagug

SEQ ID NO: 2677 - RNA, 19 nt, Artificial Sequence
  Description of Artificial Sequence: Synthetic oligonucleotide
gacgggcuuagggcagugg

SEQ ID NO: 2678 - RNA, 19 nt, Artificial Sequence
  Description of Artificial Sequence: Synthetic oligonucleotide
acgggcuuagggcagugga

SEQ ID NO: 2679 - RNA, 19 nt, Artificial Sequence
  Description of Artificial Sequence: Synthetic oligonucleotide
cgggcuuagggcaguggaa

SEQ ID NO: 2680 - RNA, 19 nt, Artificial Sequence
  Description of Artificial Sequence: Synthetic oligonucleotide
gggcuuagggcaguggaaa

SEQ ID NO: 2681 - RNA, 19 nt, Artificial Sequence
  Description of Artificial Sequence: Synthetic oligonucleotide
ggcuuagggcaguggaaag

SEQ ID NO: 2682 - RNA, 19 nt, Artificial Sequence
  Description of Artificial Sequence: Synthetic oligonucleotide
gcuuagggcaguggaaagc

SEQ ID NO: 2683 - RNA, 19 nt, Artificial Sequence
  Description of Artificial Sequence: Synthetic oligonucleotide
cuuagggcaguggaaagca

SEQ ID NO: 2684 - RNA, 19 nt, Artificial Sequence
  Description of Artificial Sequence: Synthetic oligonucleotide
uuagggcaguggaaagcag

SEQ ID NO: 2685 - RNA, 19 nt, Artificial Sequence
  Description of Artificial Sequence: Synthetic oligonucleotide
uagggcaguggaaagcagg

SEQ ID NO: 2686 - RNA, 19 nt, Artificial Sequence
  Description of Artificial Sequence: Synthetic oligonucleotide
agggcaguggaaagcaggu

SEQ ID NO: 2687 - RNA, 19 nt, Artificial Sequence
  Description of Artificial Sequence: Synthetic oligonucleotide
gggcaguggaaagcaggug

SEQ ID NO: 2688 - RNA, 19 nt, Artificial Sequence
  Description of Artificial Sequence: Synthetic oligonucleotide
ggcaguggaaagcaggugu

SEQ ID NO: 2689 - RNA, 19 nt, Artificial Sequence
  Description of Artificial Sequence: Synthetic oligonucleotide
gcaguggaaagcaggugug

SEQ ID NO: 2690 - RNA, 19 nt, Artificial Sequence
  Description of Artificial Sequence: Synthetic oligonucleotide
caguggaaagcagguguga

SEQ ID NO: 2691 - RNA, 19 nt, Artificial Sequence
  Description of Artificial Sequence: Synthetic oligonucleotide
aguggaaagcaggugugag

SEQ ID NO: 2692 - RNA, 19 nt, Artificial Sequence
  Description of Artificial Sequence: Synthetic oligonucleotide
guggaaagcaggugugaga

SEQ ID NO: 2693 - RNA, 19 nt, Artificial Sequence
  Description of Artificial Sequence: Synthetic oligonucleotide
uggaaagcaggugugagag

SEQ ID NO: 2694 - RNA, 19 nt, Artificial Sequence
  Description of Artificial Sequence: Synthetic oligonucleotide
ggaaagcaggugugagagg

SEQ ID NO: 2695 - RNA, 19 nt, Artificial Sequence
  Description of Artificial Sequence: Synthetic oligonucleotide
gaaagcaggugugagaggc

SEQ ID NO: 2696 - RNA, 19 nt, Artificial Sequence
  Description of Artificial Sequence: Synthetic oligonucleotide
aaagcaggugugagaggca

SEQ ID NO: 2697 - RNA, 19 nt, Artificial Sequence
  Description of Artificial Sequence: Synthetic oligonucleotide
aagcaggugugagaggcag

SEQ ID NO: 2698 - RNA, 19 nt, Artificial Sequence
  Description of Artificial Sequence: Synthetic oligonucleotide
agcaggugugagaggcagc

SEQ ID NO: 2699 - RNA, 19 nt, Artificial Sequence
  Description of Artificial Sequence: Synthetic oligonucleotide
gcaggugugagaggcagcu

SEQ ID NO: 2700 - RNA, 19 nt, Artificial Sequence
  Description of Artificial Sequence: Synthetic oligonucleotide
caggugugagaggcagcuu

SEQ ID NO: 2701 - RNA, 19 nt, Artificial Sequence
  Description of Artificial Sequence: Synthetic oligonucleotide
aggugugagaggcagcuuc

SEQ ID NO: 2702 - RNA, 19 nt, Artificial Sequence
  Description of Artificial Sequence: Synthetic oligonucleotide
ggugugagaggcagcuucc

SEQ ID NO: 2703 - RNA, 19 nt, Artificial Sequence
  Description of Artificial Sequence: Synthetic oligonucleotide
gugugagaggcagcuucca

SEQ ID NO: 2704 - RNA, 19 nt, Artificial Sequence
  Description of Artificial Sequence: Synthetic oligonucleotide
ugugagaggcagcuuccag

SEQ ID NO: 2705 - RNA, 19 nt, Artificial Sequence
  Description of Artificial Sequence: Synthetic oligonucleotide
gugagaggcagcuuccaga

SEQ ID NO: 2706 - RNA, 19 nt, Artificial Sequence
  Description of Artificial Sequence: Synthetic oligonucleotide
ugagaggcagcuuccagag

SEQ ID NO: 2707 - RNA, 19 nt, Artificial Sequence
  Description of Artificial Sequence: Synthetic oligonucleotide
gagaggcagcuuccagagc

SEQ ID NO: 2708 - RNA, 19 nt, Artificial Sequence
  Description of Artificial Sequence: Synthetic oligonucleotide
agaggcagcuuccagagca

SEQ ID NO: 2709 - RNA, 19 nt, Artificial Sequence
  Description of Artificial Sequence: Synthetic oligonucleotide
gaggcagcuuccagagcag

SEQ ID NO: 2710 - RNA, 19 nt, Artificial Sequence
  Description of Artificial Sequence: Synthetic oligonucleotide
aggcagcuuccagagcagc

SEQ ID NO: 2711 - RNA, 19 nt, Artificial Sequence
  Description of Artificial Sequence: Synthetic oligonucleotide
ggcagcuuccagagcagca

SEQ ID NO: 2712 - RNA, 19 nt, Artificial Sequence
  Description of Artificial Sequence: Synthetic oligonucleotide
gcagcuuccagagcagcag

SEQ ID NO: 2713 - RNA, 19 nt, Artificial Sequence
  Description of Artificial Sequence: Synthetic oligonucleotide
cagcuuccagagcagcagc

SEQ ID NO: 2714 - RNA, 19 nt, Artificial Sequence
  Description of Artificial Sequence: Synthetic oligonucleotide
agcuuccagagcagcagcu

SEQ ID NO: 2715 - RNA, 19 nt, Artificial Sequence
  Description of Artificial Sequence: Synthetic oligonucleotide
gcuuccagagcagcagcug

SEQ ID NO: 2716 - RNA, 19 nt, Artificial Sequence
  Description of Artificial Sequence: Synthetic oligonucleotide
cuuccagagcagcagcugu

SEQ ID NO: 2717 - RNA, 19 nt, Artificial Sequence
  Description of Artificial Sequence: Synthetic oligonucleotide
uuccagagcagcagcugug

SEQ ID NO: 2718 - RNA, 19 nt, Artificial Sequence
  Description of Artificial Sequence: Synthetic oligonucleotide
uccagagcagcagcugugc

SEQ ID NO: 2719 - RNA, 19 nt, Artificial Sequence
  Description of Artificial Sequence: Synthetic oligonucleotide
ccagagcagcagcugugcc

SEQ ID NO: 2720 - RNA, 19 nt, Artificial Sequence
  Description of Artificial Sequence: Synthetic oligonucleotide
cagagcagcagcugugccg

SEQ ID NO: 2721 - RNA, 19 nt, Artificial Sequence
  Description of Artificial Sequence: Synthetic oligonucleotide
agagcagcagcugugccgc

SEQ ID NO: 2722 - RNA, 19 nt, Artificial Sequence
  Description of Artificial Sequence: Synthetic oligonucleotide
gagcagcagcugugccgcc

SEQ ID NO: 2723 - RNA, 19 nt, Artificial Sequence
  Description of Artificial Sequence: Synthetic oligonucleotide
agcagcagcugugccgccu

SEQ ID NO: 2724 - RNA, 19 nt, Artificial Sequence
  Description of Artificial Sequence: Synthetic oligonucleotide
gcagcagcugugccgccuu

SEQ ID NO: 2725 - RNA, 19 nt, Artificial Sequence
  Description of Artificial Sequence: Synthetic oligonucleotide
cagcagcugugccgccuuc

SEQ ID NO: 2726 - RNA, 19 nt, Artificial Sequence
  Description of Artificial Sequence: Synthetic oligonucleotide
agcagcugugccgccuucc

SEQ ID NO: 2727 - RNA, 19 nt, Artificial Sequence
  Description of Artificial Sequence: Synthetic oligonucleotide
gcagcugugccgccuuccu

SEQ ID NO: 2728 - RNA, 19 nt, Artificial Sequence
  Description of Artificial Sequence: Synthetic oligonucleotide
cagcugugccgccuuccug

SEQ ID NO: 2729 - RNA, 19 nt, Artificial Sequence
  Description of Artificial Sequence: Synthetic oligonucleotide
agcugugccgccuuccuga

SEQ ID NO: 2730 - RNA, 19 nt, Artificial Sequence
  Description of Artificial Sequence: Synthetic oligonucleotide
gcugugccgccuuccugaa

SEQ ID NO: 2731 - RNA, 19 nt, Artificial Sequence
  Description of Artificial Sequence: Synthetic oligonucleotide
cugugccgccuuccugaau

SEQ ID NO: 2732 - RNA, 19 nt, Artificial Sequence
  Description of Artificial Sequence: Synthetic oligonucleotide
ugugccgccuuccugaaua

SEQ ID NO: 2733 - RNA, 19 nt, Artificial Sequence
  Description of Artificial Sequence: Synthetic oligonucleotide
gugccgccuuccugaauau

SEQ ID NO: 2734 - RNA, 19 nt, Artificial Sequence
  Description of Artificial Sequence: Synthetic oligonucleotide
ugccgccuuccugaauaug

SEQ ID NO: 2735 - RNA, 19 nt, Artificial Sequence
  Description of Artificial Sequence: Synthetic oligonucleotide
gccgccuuccugaauaugu

SEQ ID NO: 2736 - RNA, 19 nt, Artificial Sequence
  Description of Artificial Sequence: Synthetic oligonucleotide
ccgccuuccugaauaugug

SEQ ID NO: 2737 - RNA, 19 nt, Artificial Sequence
  Description of Artificial Sequence: Synthetic oligonucleotide
cgccuuccugaauaugugg

SEQ ID NO: 2738 - RNA, 19 nt, Artificial Sequence
  Description of Artificial Sequence: Synthetic oligonucleotide
gccuuccugaauauguggu

SEQ ID NO: 2739 - RNA, 19 nt, Artificial Sequence
  Description of Artificial Sequence: Synthetic oligonucleotide
ccuuccugaauaugugguc

SEQ ID NO: 2740 - RNA, 19 nt, Artificial Sequence
  Description of Artificial Sequence: Synthetic oligonucleotide
cuuccugaauauguggucc

SEQ ID NO: 2741 - RNA, 19 nt, Artificial Sequence
  Description of Artificial Sequence: Synthetic oligonucleotide
uuccugaauaugugguccg

SEQ ID NO: 2742 - RNA, 19 nt, Artificial Sequence
  Description of Artificial Sequence: Synthetic oligonucleotide
uccugaauaugugguccga

SEQ ID NO: 2743 - RNA, 19 nt, Artificial Sequence
  Description of Artificial Sequence: Synthetic oligonucleotide
ccugaauaugugguccgag

SEQ ID NO: 2744 - RNA, 19 nt, Artificial Sequence
  Description of Artificial Sequence: Synthetic oligonucleotide
cugaauaugugguccgaga

SEQ ID NO: 2745 - RNA, 19 nt, Artificial Sequence
  Description of Artificial Sequence: Synthetic oligonucleotide
ugaauaugugguccgagac

SEQ ID NO: 2746 - RNA, 19 nt, Artificial Sequence
  Description of Artificial Sequence: Synthetic oligonucleotide
gaauaugugguccgagacc

SEQ ID NO: 2747 - RNA, 19 nt, Artificial Sequence
  Description of Artificial Sequence: Synthetic oligonucleotide
aauaugugguccgagaccc

SEQ ID NO: 2748 - RNA, 19 nt, Artificial Sequence
  Description of Artificial Sequence: Synthetic oligonucleotide
auaugugguccgagacccc

SEQ ID NO: 2749 - RNA, 19 nt, Artificial Sequence
  Description of Artificial Sequence: Synthetic oligonucleotide
uaugugguccgagaccccc

SEQ ID NO: 2750 - RNA, 19 nt, Artificial Sequence
  Description of Artificial Sequence: Synthetic oligonucleotide
augugguccgagaccccca

SEQ ID NO: 2751 - RNA, 19 nt, Artificial Sequence
  Description of Artificial Sequence: Synthetic oligonucleotide
ugugguccgagacccccag

SEQ ID NO: 2752 - RNA, 19 nt, Artificial Sequence
  Description of Artificial Sequence: Synthetic oligonucleotide
gugguccgagacccccagg

SEQ ID NO: 2753 - RNA, 19 nt, Artificial Sequence
  Description of Artificial Sequence: Synthetic oligonucleotide
ugguccgagacccccaggg

SEQ ID NO: 2754 - RNA, 19 nt, Artificial Sequence
  Description of Artificial Sequence: Synthetic oligonucleotide
gguccgagacccccaggga

SEQ ID NO: 2755 - RNA, 19 nt, Artificial Sequence
  Description of Artificial Sequence: Synthetic oligonucleotide
guccgagacccccagggau

SEQ ID NO: 2756 - RNA, 19 nt, Artificial Sequence
  Description of Artificial Sequence: Synthetic oligonucleotide
uccgagacccccagggaug

SEQ ID NO: 2757 - RNA, 19 nt, Artificial Sequence
  Description of Artificial Sequence: Synthetic oligonucleotide
ccgagacccccagggaugg

SEQ ID NO: 2758 - RNA, 19 nt, Artificial Sequence
  Description of Artificial Sequence: Synthetic oligonucleotide
cgagacccccagggauggg

SEQ ID NO: 2759 - RNA, 19 nt, Artificial Sequence
  Description of Artificial Sequence: Synthetic oligonucleotide
gagacccccagggaugggu

SEQ ID NO: 2760 - RNA, 19 nt, Artificial Sequence
  Description of Artificial Sequence: Synthetic oligonucleotide
agacccccagggaugggug

SEQ ID NO: 2761 - RNA, 19 nt, Artificial Sequence
  Description of Artificial Sequence: Synthetic oligonucleotide
gacccccagggaugggugg

SEQ ID NO: 2762 - RNA, 19 nt, Artificial Sequence
  Description of Artificial Sequence: Synthetic oligonucleotide
acccccagggauggguggc

SEQ ID NO: 2763 - RNA, 19 nt, Artificial Sequence
  Description of Artificial Sequence: Synthetic oligonucleotide
cccccagggauggguggca

SEQ ID NO: 2764 - RNA, 19 nt, Artificial Sequence
  Description of Artificial Sequence: Synthetic oligonucleotide
ccccagggauggguggcag

SEQ ID NO: 2765 - RNA, 19 nt, Artificial Sequence
  Description of Artificial Sequence: Synthetic oligonucleotide
cccagggauggguggcagg

SEQ ID NO: 2766 - RNA, 19 nt, Artificial Sequence
  Description of Artificial Sequence: Synthetic oligonucleotide
ccagggauggguggcaggg

SEQ ID NO: 2767 - RNA, 19 nt, Artificial Sequence
  Description of Artificial Sequence: Synthetic oligonucleotide
cagggauggguggcaggga

SEQ ID NO: 2768 - RNA, 19 nt, Artificial Sequence
  Description of Artificial Sequence: Synthetic oligonucleotide
agggauggguggcagggaa

SEQ ID NO: 2769 - RNA, 19 nt, Artificial Sequence
  Description of Artificial Sequence: Synthetic oligonucleotide
gggauggguggcagggaau

SEQ ID NO: 2770 - RNA, 19 nt, Artificial Sequence
  Description of Artificial Sequence: Synthetic oligonucleotide
ggauggguggcagggaauc

SEQ ID NO: 2771 - RNA, 19 nt, Artificial Sequence
  Description of Artificial Sequence: Synthetic oligonucleotide
gauggguggcagggaaucu

SEQ ID NO: 2772 - RNA, 19 nt, Artificial Sequence
  Description of Artificial Sequence: Synthetic oligonucleotide
auggguggcagggaaucug

SEQ ID NO: 2773 - RNA, 19 nt, Artificial Sequence
  Description of Artificial Sequence: Synthetic oligonucleotide
uggguggcagggaaucuga

SEQ ID NO: 2774 - RNA, 19 nt, Artificial Sequence
  Description of Artificial Sequence: Synthetic oligonucleotide
ggguggcagggaaucugag

SEQ ID NO: 2775 - RNA, 19 nt, Artificial Sequence
  Description of Artificial Sequence: Synthetic oligonucleotide
gguggcagggaaucugagu

SEQ ID NO: 2776 - RNA, 19 nt, Artificial Sequence
  Description of Artificial Sequence: Synthetic oligonucleotide
guggcagggaaucugagug

SEQ ID NO: 2777 - RNA, 19 nt, Artificial Sequence
  Description of Artificial Sequence: Synthetic oligonucleotide
uggcagggaaucugagugc

SEQ ID NO: 2778 - RNA, 19 nt, Artificial Sequence
  Description of Artificial Sequence: Synthetic oligonucleotide
ggcagggaaucugagugcc

SEQ ID NO: 2779 - RNA, 19 nt, Artificial Sequence
  Description of Artificial Sequence: Synthetic oligonucleotide
gcagggaaucugagugccc

SEQ ID NO: 2780 - RNA, 19 nt, Artificial Sequence
  Description of Artificial Sequence: Synthetic oligonucleotide
cagggaaucugagugcccg

SEQ ID NO: 2781 - RNA, 19 nt, Artificial Sequence
  Description of Artificial Sequence: Synthetic oligonucleotide
agggaaucugagugcccga

SEQ ID NO: 2782 - RNA, 19 nt, Artificial Sequence
  Description of Artificial Sequence: Synthetic oligonucleotide
gggaaucugagugcccgag

SEQ ID NO: 2783 - RNA, 19 nt, Artificial Sequence
  Description of Artificial Sequence: Synthetic oligonucleotide
ggaaucugagugcccgagg

SEQ ID NO: 2784 - RNA, 19 nt, Artificial Sequence
  Description of Artificial Sequence: Synthetic oligonucleotide
gaaucugagugcccgaggg

SEQ ID NO: 2785 - RNA, 19 nt, Artificial Sequence
  Description of Artificial Sequence: Synthetic oligonucleotide
aaucugagugcccgagggg

SEQ ID NO: 2786 - RNA, 19 nt, Artificial Sequence
  Description of Artificial Sequence: Synthetic oligonucleotide
aucugagugcccgagggga

SEQ ID NO: 2787 - RNA, 19 nt, Artificial Sequence
  Description of Artificial Sequence: Synthetic oligonucleotide
ucugagugcccgaggggau

SEQ ID NO: 2788 - RNA, 19 nt, Artificial Sequence
  Description of Artificial Sequence: Synthetic oligonucleotide
cugagugcccgaggggaug

SEQ ID NO: 2789 - RNA, 19 nt, Artificial Sequence
  Description of Artificial Sequence: Synthetic oligonucleotide
ugagugcccgaggggaugg

SEQ ID NO: 2790 - RNA, 19 nt, Artificial Sequence
  Description of Artificial Sequence: Synthetic oligonucleotide
gagugcccgaggggaugga

SEQ ID NO: 2791 - RNA, 19 nt, Artificial Sequence
  Description of Artificial Sequence: Synthetic oligonucleotide
agugcccgaggggauggag

SEQ ID NO: 2792 - RNA, 19 nt, Artificial Sequence
  Description of Artificial Sequence: Synthetic oligonucleotide
gugcccgaggggauggagc

SEQ ID NO: 2793 - RNA, 19 nt, Artificial Sequence
  Description of Artificial Sequence: Synthetic oligonucleotide
ugcccgaggggauggagcu

SEQ ID NO: 2794 - RNA, 19 nt, Artificial Sequence
  Description of Artificial Sequence: Synthetic oligonucleotide
gcccgaggggauggagcug

SEQ ID NO: 2795 - RNA, 19 nt, Artificial Sequence
  Description of Artificial Sequence: Synthetic oligonucleotide
cccgaggggauggagcugc

SEQ ID NO: 2796 - RNA, 19 nt, Artificial Sequence
  Description of Artificial Sequence: Synthetic oligonucleotide
ccgaggggauggagcugcu

SEQ ID NO: 2797 - RNA, 19 nt, Artificial Sequence
  Description of Artificial Sequence: Synthetic oligonucleotide
cgaggggauggagcugcug

SEQ ID NO: 2798 - RNA, 19 nt, Artificial Sequence
  Description of Artificial Sequence: Synthetic oligonucleotide
gaggggauggagcugcugg

SEQ ID NO: 2799 - RNA, 19 nt, Artificial Sequence
  Description of Artificial Sequence: Synthetic oligonucleotide
aggggauggagcugcuggc

SEQ ID NO: 2800 - RNA, 19 nt, Artificial Sequence
  Description of Artificial Sequence: Synthetic oligonucleotide
ggggauggagcugcuggcu

SEQ ID NO: 2801 - RNA, 19 nt, Artificial Sequence
  Description of Artificial Sequence: Synthetic oligonucleotide
gggauggagcugcuggcuu

SEQ ID NO: 2802 - RNA, 19 nt, Artificial Sequence
  Description of Artificial Sequence: Synthetic oligonucleotide
ggauggagcugcuggcuuu

SEQ ID NO: 2803 - RNA, 19 nt, Artificial Sequence
  Description of Artificial Sequence: Synthetic oligonucleotide
gauggagcugcuggcuuua

SEQ ID NO: 2804 - RNA, 19 nt, Artificial Sequence
  Description of Artificial Sequence: Synthetic oligonucleotide
auggagcugcuggcuuuac

SEQ ID NO: 2805 - RNA, 19 nt, Artificial Sequence
  Description of Artificial Sequence: Synthetic oligonucleotide
uggagcugcuggcuuuaca

SEQ ID NO: 2806 - RNA, 19 nt, Artificial Sequence
  Description of Artificial Sequence: Synthetic oligonucleotide
ggagcugcuggcuuuacac

SEQ ID NO: 2807 - RNA, 19 nt, Artificial Sequence
  Description of Artificial Sequence: Synthetic oligonucleotide
gagcugcuggcuuuacacu

SEQ ID NO: 2808 - RNA, 19 nt, Artificial Sequence
  Description of Artificial Sequence: Synthetic oligonucleotide
agcugcuggcuuuacacug

SEQ ID NO: 2809 - RNA, 19 nt, Artificial Sequence
  Description of Artificial Sequence: Synthetic oligonucleotide
gcugcuggcuuuacacugc

SEQ ID NO: 2810 - RNA, 19 nt, Artificial Sequence
  Description of Artificial Sequence: Synthetic oligonucleotide
cugcuggcuuuacacugcc

SEQ ID NO: 2811 - RNA, 19 nt, Artificial Sequence
  Description of Artificial Sequence: Synthetic oligonucleotide
ugcuggcuuuacacugccu

SEQ ID NO: 2812 - RNA, 19 nt, Artificial Sequence
  Description of Artificial Sequence: Synthetic oligonucleotide
gcuggcuuuacacugccug

SEQ ID NO: 2813 - RNA, 19 nt, Artificial Sequence
  Description of Artificial Sequence: Synthetic oligonucleotide
cuggcuuuacacugccugg

SEQ ID NO: 2814 - RNA, 19 nt, Artificial Sequence
  Description of Artificial Sequence: Synthetic oligonucleotide
uggcuuuacacugccuggc

SEQ ID NO: 2815 - RNA, 19 nt, Artificial Sequence
  Description of Artificial Sequence: Synthetic oligonucleotide
ggcuuuacacugccuggcu

SEQ ID NO: 2816 - RNA, 19 nt, Artificial Sequence
  Description of Artificial Sequence: Synthetic oligonucleotide
gcuuuacacugccuggcuu

SEQ ID NO: 2817 - RNA, 19 nt, Artificial Sequence
  Description of Artificial Sequence: Synthetic oligonucleotide
cuuuacacugccuggcuuu

SEQ ID NO: 2818 - RNA, 19 nt, Artificial Sequence
  Description of Artificial Sequence: Synthetic oligonucleotide
uuuacacugccuggcuuuc

SEQ ID NO: 2819 - RNA, 19 nt, Artificial Sequence
  Description of Artificial Sequence: Synthetic oligonucleotide
uuacacugccuggcuuucg

SEQ ID NO: 2820 - RNA, 19 nt, Artificial Sequence
  Description of Artificial Sequence: Synthetic oligonucleotide
uacacugccuggcuuucgc

SEQ ID NO: 2821 - RNA, 19 nt, Artificial Sequence
  Description of Artificial Sequence: Synthetic oligonucleotide
acacugccuggcuuucgcu

SEQ ID NO: 2822 - RNA, 19 nt, Artificial Sequence
  Description of Artificial Sequence: Synthetic oligonucleotide
cacugccuggcuuucgcuu

SEQ ID NO: 2823 - RNA, 19 nt, Artificial Sequence
  Description of Artificial Sequence: Synthetic oligonucleotide
acugccuggcuuucgcuuc

SEQ ID NO: 2824 - RNA, 19 nt, Artificial Sequence
  Description of Artificial Sequence: Synthetic oligonucleotide
cugccuggcuuucgcuucc

SEQ ID NO: 2825 - RNA, 19 nt, Artificial Sequence
  Description of Artificial Sequence: Synthetic oligonucleotide
ugccuggcuuucgcuuccu

SEQ ID NO: 2826 - RNA, 19 nt, Artificial Sequence
  Description of Artificial Sequence: Synthetic oligonucleotide
gccuggcuuucgcuuccua

SEQ ID NO: 2827 - RNA, 19 nt, Artificial Sequence
  Description of Artificial Sequence: Synthetic oligonucleotide
ccuggcuuucgcuuccuac

SEQ ID NO: 2828 - RNA, 19 nt, Artificial Sequence
  Description of Artificial Sequence: Synthetic oligonucleotide
cuggcuuucgcuuccuacc

SEQ ID NO: 2829 - RNA, 19 nt, Artificial Sequence
  Description of Artificial Sequence: Synthetic oligonucleotide
uggcuuucgcuuccuaccc

SEQ ID NO: 2830 - RNA, 19 nt, Artificial Sequence
  Description of Artificial Sequence: Synthetic oligonucleotide
ggcuuucgcuuccuacccc

SEQ ID NO: 2831 - RNA, 19 nt, Artificial Sequence
  Description of Artificial Sequence: Synthetic oligonucleotide
gcuuucgcuuccuaccccc

SEQ ID NO: 2832 - RNA, 19 nt, Artificial Sequence
  Description of Artificial Sequence: Synthetic oligonucleotide
cuuucgcuuccuaccccca

SEQ ID NO: 2833 - RNA, 19 nt, Artificial Sequence
  Description of Artificial Sequence: Synthetic oligonucleotide
uuucgcuuccuacccccac

SEQ ID NO: 2834 - RNA, 19 nt, Artificial Sequence
  Description of Artificial Sequence: Synthetic oligonucleotide
uucgcuuccuacccccacc

SEQ ID NO: 2835 - RNA, 19 nt, Artificial Sequence
  Description of Artificial Sequence: Synthetic oligonucleotide
ucgcuuccuacccccaccc

SEQ ID NO: 2836 - RNA, 19 nt, Artificial Sequence
  Description of Artificial Sequence: Synthetic oligonucleotide
cgcuuccuacccccacccc

SEQ ID NO: 2837 - RNA, 19 nt, Artificial Sequence
  Description of Artificial Sequence: Synthetic oligonucleotide
gcuuccuacccccacccca

SEQ ID NO: 2838 - RNA, 19 nt, Artificial Sequence
  Description of Artificial Sequence: Synthetic oligonucleotide
cuuccuacccccaccccau

SEQ ID NO: 2839 - RNA, 19 nt, Artificial Sequence
  Description of Artificial Sequence: Synthetic oligonucleotide
uuccuacccccaccccauc

SEQ ID NO: 2840 - RNA, 19 nt, Artificial Sequence
  Description of Artificial Sequence: Synthetic oligonucleotide
uccuacccccaccccaucc

SEQ ID NO: 2841 - RNA, 19 nt, Artificial Sequence
  Description of Artificial Sequence: Synthetic oligonucleotide
ccuacccccaccccaucca

SEQ ID NO: 2842 - RNA, 19 nt, Artificial Sequence
  Description of Artificial Sequence: Synthetic oligonucleotide
cuacccccaccccauccac

SEQ ID NO: 2843 - RNA, 19 nt, Artificial Sequence
  Description of Artificial Sequence: Synthetic oligonucleotide
uacccccaccccauccacc

SEQ ID NO: 2844 - RNA, 19 nt, Artificial Sequence
  Description of Artificial Sequence: Synthetic oligonucleotide
acccccaccccauccaccc

SEQ ID NO: 2845 - RNA, 19 nt, Artificial Sequence
  Description of Artificial Sequence: Synthetic oligonucleotide
cccccaccccauccaccca

SEQ ID NO: 2846 - RNA, 19 nt, Artificial Sequence
  Description of Artificial Sequence: Synthetic oligonucleotide
ccccaccccauccacccag

SEQ ID NO: 2847 - RNA, 19 nt, Artificial Sequence
  Description of Artificial Sequence: Synthetic oligonucleotide
cccaccccauccacccagu

SEQ ID NO: 2848 - RNA, 19 nt, Artificial Sequence
  Description of Artificial Sequence: Synthetic oligonucleotide
ccaccccauccacccagug

SEQ ID NO: 2849 - RNA, 19 nt, Artificial Sequence
  Description of Artificial Sequence: Synthetic oligonucleotide
caccccauccacccagugc

SEQ ID NO: 2850 - RNA, 19 nt, Artificial Sequence
  Description of Artificial Sequence: Synthetic oligonucleotide
accccauccacccagugcc

SEQ ID NO: 2851 - RNA, 19 nt, Artificial Sequence
  Description of Artificial Sequence: Synthetic oligonucleotide
ccccauccacccagugcca

SEQ ID NO: 2852 - RNA, 19 nt, Artificial Sequence
  Description of Artificial Sequence: Synthetic oligonucleotide
cccauccacccagugccaa

SEQ ID NO: 2853 - RNA, 19 nt, Artificial Sequence
  Description of Artificial Sequence: Synthetic oligonucleotide
ccauccacccagugccaac

SEQ ID NO: 2854 - RNA, 19 nt, Artificial Sequence
  Description of Artificial Sequence: Synthetic oligonucleotide
cauccacccagugccaacc

SEQ ID NO: 2855 - RNA, 19 nt, Artificial Sequence
  Description of Artificial Sequence: Synthetic oligonucleotide
auccacccagugccaaccu

SEQ ID NO: 2856 - RNA, 19 nt, Artificial Sequence
  Description of Artificial Sequence: Synthetic oligonucleotide
uccacccagugccaaccua

SEQ ID NO: 2857 - RNA, 19 nt, Artificial Sequence
  Description of Artificial Sequence: Synthetic oligonucleotide
ccacccagugccaaccuag

SEQ ID NO: 2858 - RNA, 19 nt, Artificial Sequence
  Description of Artificial Sequence: Synthetic oligonucleotide
cacccagugccaaccuagu

SEQ ID NO: 2859 - RNA, 19 nt, Artificial Sequence
  Description of Artificial Sequence: Synthetic oligonucleotide
acccagugccaaccuaguu

SEQ ID NO: 2860 - RNA, 19 nt, Artificial Sequence
  Description of Artificial Sequence: Synthetic oligonucleotide
cccagugccaaccuaguuc

SEQ ID NO: 2861 - RNA, 19 nt, Artificial Sequence
  Description of Artificial Sequence: Synthetic oligonucleotide
ccagugccaaccuaguucc

SEQ ID NO: 2862 - RNA, 19 nt, Artificial Sequence
  Description of Artificial Sequence: Synthetic oligonucleotide
cagugccaaccuaguucca

SEQ ID NO: 2863 - RNA, 19 nt, Artificial Sequence
  Description of Artificial Sequence: Synthetic oligonucleotide
agugccaaccuaguuccac

SEQ ID NO: 2864 - RNA, 19 nt, Artificial Sequence
  Description of Artificial Sequence: Synthetic oligonucleotide
gugccaaccuaguuccacu

SEQ ID NO: 2865 - RNA, 19 nt, Artificial Sequence
  Description of Artificial Sequence: Synthetic oligonucleotide
ugccaaccuaguuccacug

SEQ ID NO: 2866 - RNA, 19 nt, Artificial Sequence
  Description of Artificial Sequence: Synthetic oligonucleotide
gccaaccuaguuccacuga

SEQ ID NO: 2867 - RNA, 19 nt, Artificial Sequence
  Description of Artificial Sequence: Synthetic oligonucleotide
ccaaccuaguuccacugaa

SEQ ID NO: 2868 - RNA, 19 nt, Artificial Sequence
  Description of Artificial Sequence: Synthetic oligonucleotide
caaccuaguuccacugaag

SEQ ID NO: 2869 - RNA, 19 nt, Artificial Sequence
  Description of Artificial Sequence: Synthetic oligonucleotide
aaccuaguuccacugaagc

SEQ ID NO: 2870 - RNA, 19 nt, Artificial Sequence
  Description of Artificial Sequence: Synthetic oligonucleotide
accuaguuccacugaagcc

SEQ ID NO: 2871 - RNA, 19 nt, Artificial Sequence
  Description of Artificial Sequence: Synthetic oligonucleotide
ccuaguuccacugaagccu

SEQ ID NO: 2872 - RNA, 19 nt, Artificial Sequence
  Description of Artificial Sequence: Synthetic oligonucleotide
cuaguuccacugaagccug

SEQ ID NO: 2873 - RNA, 19 nt, Artificial Sequence
  Description of Artificial Sequence: Synthetic oligonucleotide
uaguuccacugaagccuga

SEQ ID NO: 2874 - RNA, 19 nt, Artificial Sequence
  Description of Artificial Sequence: Synthetic oligonucleotide
aguuccacugaagccugag

SEQ ID NO: 2875 - RNA, 19 nt, Artificial Sequence
  Description of Artificial Sequence: Synthetic oligonucleotide
guuccacugaagccugagg

SEQ ID NO: 2876 - RNA, 19 nt, Artificial Sequence
  Description of Artificial Sequence: Synthetic oligonucleotide
uuccacugaagccugagga

SEQ ID NO: 2877 - RNA, 19 nt, Artificial Sequence
  Description of Artificial Sequence: Synthetic oligonucleotide
uccacugaagccugaggag

SEQ ID NO: 2878 - RNA, 19 nt, Artificial Sequence
  Description of Artificial Sequence: Synthetic oligonucleotide
ccacugaagccugaggagc

SEQ ID NO: 2879 - RNA, 19 nt, Artificial Sequence
  Description of Artificial Sequence: Synthetic oligonucleotide
cacugaagccugaggagca

SEQ ID NO: 2880 - RNA, 19 nt, Artificial Sequence
  Description of Artificial Sequence: Synthetic oligonucleotide
acugaagccugaggagcau

SEQ ID NO: 2881 - RNA, 19 nt, Artificial Sequence
  Description of Artificial Sequence: Synthetic oligonucleotide
cugaagccugaggagcaug

SEQ ID NO: 2882 - RNA, 19 nt, Artificial Sequence
  Description of Artificial Sequence: Synthetic oligonucleotide
ugaagccugaggagcaugc

SEQ ID NO: 2883 - RNA, 19 nt, Artificial Sequence
  Description of Artificial Sequence: Synthetic oligonucleotide
gaagccugaggagcaugcc

SEQ ID NO: 2884 - RNA, 19 nt, Artificial Sequence
  Description of Artificial Sequence: Synthetic oligonucleotide
aagccugaggagcaugcca

SEQ ID NO: 2885 - RNA, 19 nt, Artificial Sequence
  Description of Artificial Sequence: Synthetic oligonucleotide
agccugaggagcaugccau

SEQ ID NO: 2886 - RNA, 19 nt, Artificial Sequence
  Description of Artificial Sequence: Synthetic oligonucleotide
gccugaggagcaugccauu

SEQ ID NO: 2887 - RNA, 19 nt, Artificial Sequence
  Description of Artificial Sequence: Synthetic oligonucleotide
ccugaggagcaugccauua

SEQ ID NO: 2888 - RNA, 19 nt, Artificial Sequence
  Description of Artificial Sequence: Synthetic oligonucleotide
cugaggagcaugccauuaa

SEQ ID NO: 2889 - RNA, 19 nt, Artificial Sequence
  Description of Artificial Sequence: Synthetic oligonucleotide
ugaggagcaugccauuaag

SEQ ID NO: 2890 - RNA, 19 nt, Artificial Sequence
  Description of Artificial Sequence: Synthetic oligonucleotide
gaggagcaugccauuaagu

SEQ ID NO: 2891 - RNA, 19 nt, Artificial Sequence
  Description of Artificial Sequence: Synthetic oligonucleotide
aggagcaugccauuaaguu

SEQ ID NO: 2892 - RNA, 19 nt, Artificial Sequence
  Description of Artificial Sequence: Synthetic oligonucleotide
ggagcaugccauuaaguuu

SEQ ID NO: 2893 - RNA, 19 nt, Artificial Sequence
  Description of Artificial Sequence: Synthetic oligonucleotide
gagcaugccauuaaguuug

SEQ ID NO: 2894 - RNA, 19 nt, Artificial Sequence
  Description of Artificial Sequence: Synthetic oligonucleotide
agcaugccauuaaguuuga

SEQ ID NO: 2895 - RNA, 19 nt, Artificial Sequence
  Description of Artificial Sequence: Synthetic oligonucleotide
gcaugccauuaaguuugag

SEQ ID NO: 2896 - RNA, 19 nt, Artificial Sequence
  Description of Artificial Sequence: Synthetic oligonucleotide
caugccauuaaguuugagu

SEQ ID NO: 2897 - RNA, 19 nt, Artificial Sequence
  Description of Artificial Sequence: Synthetic oligonucleotide
augccauuaaguuugagua

SEQ ID NO: 2898 - RNA, 19 nt, Artificial Sequence
  Description of Artificial Sequence: Synthetic oligonucleotide
ugccauuaaguuugaguau

SEQ ID NO: 2899 - RNA, 19 nt, Artificial Sequence
  Description of Artificial Sequence: Synthetic oligonucleotide
gccauuaaguuugaguaua

SEQ ID NO: 2900 - RNA, 19 nt, Artificial Sequence
  Description of Artificial Sequence: Synthetic oligonucleotide
ccauuaaguuugaguauau

SEQ ID NO: 2901 - RNA, 19 nt, Artificial Sequence
  Description of Artificial Sequence: Synthetic oligonucleotide
cauuaaguuugaguauauu

SEQ ID NO: 2902 - RNA, 19 nt, Artificial Sequence
  Description of Artificial Sequence: Synthetic oligonucleotide
auuaaguuugaguauauug

SEQ ID NO: 2903 - RNA, 19 nt, Artificial Sequence
  Description of Artificial Sequence: Synthetic oligonucleotide
uuaaguuugaguauauugg

SEQ ID NO: 2904 - RNA, 19 nt, Artificial Sequence
  Description of Artificial Sequence: Synthetic oligonucleotide
uaaguuugaguauauuggg

SEQ ID NO: 2905 - RNA, 19 nt, Artificial Sequence
  Description of Artificial Sequence: Synthetic oligonucleotide
aaguuugaguauauugggc

SEQ ID NO: 2906 - RNA, 19 nt, Artificial Sequence
  Description of Artificial Sequence: Synthetic oligonucleotide
aguuugaguauauugggcu

SEQ ID NO: 2907 - RNA, 19 nt, Artificial Sequence
  Description of Artificial Sequence: Synthetic oligonucleotide
guuugaguauauugggcug

SEQ ID NO: 2908 - RNA, 19 nt, Artificial Sequence
  Description of Artificial Sequence: Synthetic oligonucleotide
uuugaguauauugggcugg

SEQ ID NO: 2909 - RNA, 19 nt, Artificial Sequence
  Description of Artificial Sequence: Synthetic oligonucleotide
uugaguauauugggcuggg

SEQ ID NO: 2910 - RNA, 19 nt, Artificial Sequence
  Description of Artificial Sequence: Synthetic oligonucleotide
ugaguauauugggcugggc

SEQ ID NO: 2911 - RNA, 19 nt, Artificial Sequence
  Description of Artificial Sequence: Synthetic oligonucleotide
gaguauauugggcugggcg

SEQ ID NO: 2912 - RNA, 19 nt, Artificial Sequence
  Description of Artificial Sequence: Synthetic oligonucleotide
aguauauugggcugggcgc

SEQ ID NO: 2913 - RNA, 19 nt, Artificial Sequence
  Description of Artificial Sequence: Synthetic oligonucleotide
guauauugggcugggcgcu

SEQ ID NO: 2914 - RNA, 19 nt, Artificial Sequence
  Description of Artificial Sequence: Synthetic oligonucleotide
uauauugggcugggcgcug

SEQ ID NO: 2915 - RNA, 19 nt, Artificial Sequence
  Description of Artificial Sequence: Synthetic oligonucleotide
auauugggcugggcgcugu

SEQ ID NO: 2916 - RNA, 19 nt, Artificial Sequence
  Description of Artificial Sequence: Synthetic oligonucleotide
uauugggcugggcgcugug

SEQ ID NO: 2917 - RNA, 19 nt, Artificial Sequence
  Description of Artificial Sequence: Synthetic oligonucleotide
auugggcugggcgcugugg

SEQ ID NO: 2918 - RNA, 19 nt, Artificial Sequence
  Description of Artificial Sequence: Synthetic oligonucleotide
uugggcugggcgcuguggc

SEQ ID NO: 2919 - RNA, 19 nt, Artificial Sequence
  Description of Artificial Sequence: Synthetic oligonucleotide
ugggcugggcgcuguggcu

SEQ ID NO: 2920 - RNA, 19 nt, Artificial Sequence
  Description of Artificial Sequence: Synthetic oligonucleotide
gggcugggcgcuguggcug

SEQ ID NO: 2921 - RNA, 19 nt, Artificial Sequence
  Description of Artificial Sequence: Synthetic oligonucleotide
ggcugggcgcuguggcuga

SEQ ID NO: 2922 - RNA, 19 nt, Artificial Sequence
  Description of Artificial Sequence: Synthetic oligonucleotide
gcugggcgcuguggcugac

SEQ ID NO: 2923 - RNA, 19 nt, Artificial Sequence
  Description of Artificial Sequence: Synthetic oligonucleotide
cugggcgcuguggcugacu

SEQ ID NO: 2924 - RNA, 19 nt, Artificial Sequence
  Description of Artificial Sequence: Synthetic oligonucleotide
ugggcgcuguggcugacug

SEQ ID NO: 2925 - RNA, 19 nt, Artificial Sequence
  Description of Artificial Sequence: Synthetic oligonucleotide
gggcgcuguggcugacugu

SEQ ID NO: 2926 - RNA, 19 nt, Artificial Sequence
  Description of Artificial Sequence: Synthetic oligonucleotide
ggcgcuguggcugacugug

SEQ ID NO: 2927 - RNA, 19 nt, Artificial Sequence
  Description of Artificial Sequence: Synthetic oligonucleotide
gcgcuguggcugacugugu

SEQ ID NO: 2928 - RNA, 19 nt, Artificial Sequence
  Description of Artificial Sequence: Synthetic oligonucleotide
cgcuguggcugacugugug

SEQ ID NO: 2929 - RNA, 19 nt, Artificial Sequence
  Description of Artificial Sequence: Synthetic oligonucleotide
gcuguggcugacugugugg

SEQ ID NO: 2930 - RNA, 19 nt, Artificial Sequence
  Description of Artificial Sequence: Synthetic oligonucleotide
cuguggcugacuguguggg

SEQ ID NO: 2931 - RNA, 19 nt, Artificial Sequence
  Description of Artificial Sequence: Synthetic oligonucleotide
uguggcugacugugugggu

SEQ ID NO: 2932 - RNA, 19 nt, Artificial Sequence
  Description of Artificial Sequence: Synthetic oligonucleotide
guggcugacugugugggua

SEQ ID NO: 2933 - RNA, 19 nt, Artificial Sequence
  Description of Artificial Sequence: Synthetic oligonucleotide
uggcugacuguguggguau

SEQ ID NO: 2934 - RNA, 19 nt, Artificial Sequence
  Description of Artificial Sequence: Synthetic oligonucleotide
ggcugacuguguggguauc

SEQ ID NO: 2935 - RNA, 19 nt, Artificial Sequence
  Description of Artificial Sequence: Synthetic oligonucleotide
gcugacuguguggguauca

SEQ ID NO: 2936 - RNA, 19 nt, Artificial Sequence
  Description of Artificial Sequence: Synthetic oligonucleotide
cugacuguguggguaucaa

SEQ ID NO: 2937 - RNA, 19 nt, Artificial Sequence
  Description of Artificial Sequence: Synthetic oligonucleotide
ugacuguguggguaucaac

SEQ ID NO: 2938 - RNA, 19 nt, Artificial Sequence
  Description of Artificial Sequence: Synthetic oligonucleotide
gacuguguggguaucaacg

SEQ ID NO: 2939 - RNA, 19 nt, Artificial Sequence
  Description of Artificial Sequence: Synthetic oligonucleotide
acuguguggguaucaacgu

SEQ ID NO: 2940 - RNA, 19 nt, Artificial Sequence
  Description of Artificial Sequence: Synthetic oligonucleotide
cuguguggguaucaacgug

SEQ ID NO: 2941 - RNA, 19 nt, Artificial Sequence
  Description of Artificial Sequence: Synthetic oligonucleotide
uguguggguaucaacguga

SEQ ID NO: 2942 - RNA, 19 nt, Artificial Sequence
  Description of Artificial Sequence: Synthetic oligonucleotide
guguggguaucaacgugac

SEQ ID NO: 2943 - RNA, 19 nt, Artificial Sequence
  Description of Artificial Sequence: Synthetic oligonucleotide
uguggguaucaacgugacc

SEQ ID NO: 2944 - RNA, 19 nt, Artificial Sequence
  Description of Artificial Sequence: Synthetic oligonucleotide
guggguaucaacgugaccg

SEQ ID NO: 2945 - RNA, 19 nt, Artificial Sequence
  Description of Artificial Sequence: Synthetic oligonucleotide
uggguaucaacgugaccgu

SEQ ID NO: 2946 - RNA, 19 nt, Artificial Sequence
  Description of Artificial Sequence: Synthetic oligonucleotide
ggguaucaacgugaccgug

SEQ ID NO: 2947 - RNA, 19 nt, Artificial Sequence
  Description of Artificial Sequence: Synthetic oligonucleotide
gguaucaacgugaccgugg

SEQ ID NO: 2948 - RNA, 19 nt, Artificial Sequence
  Description of Artificial Sequence: Synthetic oligonucleotide
guaucaacgugaccguggg

SEQ ID NO: 2949 - RNA, 19 nt, Artificial Sequence
  Description of Artificial Sequence: Synthetic oligonucleotide
uaucaacgugaccgugggu

SEQ ID NO: 2950 - RNA, 19 nt, Artificial Sequence
  Description of Artificial Sequence: Synthetic oligonucleotide
aucaacgugaccgugggug

SEQ ID NO: 2951 - RNA, 19 nt, Artificial Sequence
  Description of Artificial Sequence: Synthetic oligonucleotide
ucaacgugaccgugggugg

SEQ ID NO: 2952 - RNA, 19 nt, Artificial Sequence
  Description of Artificial Sequence: Synthetic oligonucleotide
caacgugaccguggguggu

SEQ ID NO: 2953 - RNA, 19 nt, Artificial Sequence
  Description of Artificial Sequence: Synthetic oligonucleotide
aacgugaccguggguggug

SEQ ID NO: 2954 - RNA, 19 nt, Artificial Sequence
  Description of Artificial Sequence: Synthetic oligonucleotide
acgugaccgugggugguga

SEQ ID NO: 2955 - RNA, 19 nt, Artificial Sequence
  Description of Artificial Sequence: Synthetic oligonucleotide
cgugaccguggguggugag

SEQ ID NO: 2956 - RNA, 19 nt, Artificial Sequence
  Description of Artificial Sequence: Synthetic oligonucleotide
gugaccguggguggugaga

SEQ ID NO: 2957 - RNA, 19 nt, Artificial Sequence
  Description of Artificial Sequence: Synthetic oligonucleotide
ugaccguggguggugagag

SEQ ID NO: 2958 - RNA, 19 nt, Artificial Sequence
  Description of Artificial Sequence: Synthetic oligonucleotide
gaccguggguggugagagc

SEQ ID NO: 2959 - RNA, 19 nt, Artificial Sequence
  Description of Artificial Sequence: Synthetic oligonucleotide
accguggguggugagagcu

SEQ ID NO: 2960 - RNA, 19 nt, Artificial Sequence
  Description of Artificial Sequence: Synthetic oligonucleotide
ccguggguggugagagcug

SEQ ID NO: 2961 - RNA, 19 nt, Artificial Sequence
  Description of Artificial Sequence: Synthetic oligonucleotide
cguggguggugagagcugc

SEQ ID NO: 2962 - RNA, 19 nt, Artificial Sequence
  Description of Artificial Sequence: Synthetic oligonucleotide
guggguggugagagcugcc

SEQ ID NO: 2963 - RNA, 19 nt, Artificial Sequence
  Description of Artificial Sequence: Synthetic oligonucleotide
uggguggugagagcugcca

SEQ ID NO: 2964 - RNA, 19 nt, Artificial Sequence
  Description of Artificial Sequence: Synthetic oligonucleotide
ggguggugagagcugccag

SEQ ID NO: 2965 - RNA, 19 nt, Artificial Sequence
  Description of Artificial Sequence: Synthetic oligonucleotide
gguggugagagcugccagc

SEQ ID NO: 2966 - RNA, 19 nt, Artificial Sequence
  Description of Artificial Sequence: Synthetic oligonucleotide
guggugagagcugccagca

SEQ ID NO: 2967 - RNA, 19 nt, Artificial Sequence
  Description of Artificial Sequence: Synthetic oligonucleotide
uggugagagcugccagcac

SEQ ID NO: 2968 - RNA, 19 nt, Artificial Sequence
  Description of Artificial Sequence: Synthetic oligonucleotide
ggugagagcugccagcacg

SEQ ID NO: 2969 - RNA, 19 nt, Artificial Sequence
  Description of Artificial Sequence: Synthetic oligonucleotide
gugagagcugccagcacga

SEQ ID NO: 2970 - RNA, 19 nt, Artificial Sequence
  Description of Artificial Sequence: Synthetic oligonucleotide
ugagagcugccagcacgag

SEQ ID NO: 2971 - RNA, 19 nt, Artificial Sequence
  Description of Artificial Sequence: Synthetic oligonucleotide
gagagcugccagcacgagu

SEQ ID NO: 2972 - RNA, 19 nt, Artificial Sequence
  Description of Artificial Sequence: Synthetic oligonucleotide
agagcugccagcacgaguu

SEQ ID NO: 2973 - RNA, 19 nt, Artificial Sequence
  Description of Artificial Sequence: Synthetic oligonucleotide
gagcugccagcacgaguuc

SEQ ID NO: 2974 - RNA, 19 nt, Artificial Sequence
  Description of Artificial Sequence: Synthetic oligonucleotide
agcugccagcacgaguucc

SEQ ID NO: 2975 - RNA, 19 nt, Artificial Sequence
  Description of Artificial Sequence: Synthetic oligonucleotide
gcugccagcacgaguuccg

SEQ ID NO: 2976 - RNA, 19 nt, Artificial Sequence
  Description of Artificial Sequence: Synthetic oligonucleotide
cugccagcacgaguuccgg

SEQ ID NO: 2977 - RNA, 19 nt, Artificial Sequence
  Description of Artificial Sequence: Synthetic oligonucleotide
ugccagcacgaguuccggg

SEQ ID NO: 2978 - RNA, 19 nt, Artificial Sequence
  Description of Artificial Sequence: Synthetic oligonucleotide
gccagcacgaguuccgggg

SEQ ID NO: 2979 - RNA, 19 nt, Artificial Sequence
  Description of Artificial Sequence: Synthetic oligonucleotide
ccagcacgaguuccggggg

SEQ ID NO: 2980 - RNA, 19 nt, Artificial Sequence
  Description of Artificial Sequence: Synthetic oligonucleotide
cagcacgaguuccgggggg

SEQ ID NO: 2981 - RNA, 19 nt, Artificial Sequence
  Description of Artificial Sequence: Synthetic oligonucleotide
agcacgaguuccgggggga

SEQ ID NO: 2982 - RNA, 19 nt, Artificial Sequence
  Description of Artificial Sequence: Synthetic oligonucleotide
gcacgaguuccggggggac

SEQ ID NO: 2983 - RNA, 19 nt, Artificial Sequence
  Description of Artificial Sequence: Synthetic oligonucleotide
cacgaguuccggggggaca

SEQ ID NO: 2984 - RNA, 19 nt, Artificial Sequence
  Description of Artificial Sequence: Synthetic oligonucleotide
acgaguuccggggggacau

SEQ ID NO: 2985 - RNA, 19 nt, Artificial Sequence
  Description of Artificial Sequence: Synthetic oligonucleotide
cgaguuccggggggacaug

SEQ ID NO: 2986 - RNA, 19 nt, Artificial Sequence
  Description of Artificial Sequence: Synthetic oligonucleotide
gaguuccggggggacaugg

SEQ ID NO: 2987 - RNA, 19 nt, Artificial Sequence
  Description of Artificial Sequence: Synthetic oligonucleotide
aguuccggggggacauggu

SEQ ID NO: 2988 - RNA, 19 nt, Artificial Sequence
  Description of Artificial Sequence: Synthetic oligonucleotide
guuccggggggacaugguu

SEQ ID NO: 2989 - RNA, 19 nt, Artificial Sequence
  Description of Artificial Sequence: Synthetic oligonucleotide
uuccggggggacaugguug

SEQ ID NO: 2990 - RNA, 19 nt, Artificial Sequence
  Description of Artificial Sequence: Synthetic oligonucleotide
uccggggggacaugguugu

SEQ ID NO: 2991 - RNA, 19 nt, Artificial Sequence
  Description of Artificial Sequence: Synthetic oligonucleotide
ccggggggacaugguuguc

SEQ ID NO: 2992 - RNA, 19 nt, Artificial Sequence
  Description of Artificial Sequence: Synthetic oligonucleotide
cggggggacaugguugucu

SEQ ID NO: 2993 - RNA, 19 nt, Artificial Sequence
  Description of Artificial Sequence: Synthetic oligonucleotide
ggggggacaugguugucug

SEQ ID NO: 2994 - RNA, 19 nt, Artificial Sequence
  Description of Artificial Sequence: Synthetic oligonucleotide
gggggacaugguugucugc

SEQ ID NO: 2995 - RNA, 19 nt, Artificial Sequence
  Description of Artificial Sequence: Synthetic oligonucleotide
ggggacaugguugucugcc

SEQ ID NO: 2996 - RNA, 19 nt, Artificial Sequence
  Description of Artificial Sequence: Synthetic oligonucleotide
gggacaugguugucugccc

SEQ ID NO: 2997 - RNA, 19 nt, Artificial Sequence
  Description of Artificial Sequence: Synthetic oligonucleotide
ggacaugguugucugcccc

SEQ ID NO: 2998 - RNA, 19 nt, Artificial Sequence
  Description of Artificial Sequence: Synthetic oligonucleotide
gacaugguugucugccccc

SEQ ID NO: 2999 - RNA, 19 nt, Artificial Sequence
  Description of Artificial Sequence: Synthetic oligonucleotide
acaugguugucugcccccu

SEQ ID NO: 3000 - RNA, 19 nt, Artificial Sequence
  Description of Artificial Sequence: Synthetic oligonucleotide
caugguugucugcccccug

SEQ ID NO: 3001 - RNA, 19 nt, Artificial Sequence
  Description of Artificial Sequence: Synthetic oligonucleotide
augguugucugcccccugc

SEQ ID NO: 3002 - RNA, 19 nt, Artificial Sequence
  Description of Artificial Sequence: Synthetic oligonucleotide
ugguugucugcccccugcc

SEQ ID NO: 3003 - RNA, 19 nt, Artificial Sequence
  Description of Artificial Sequence: Synthetic oligonucleotide
gguugucugcccccugccc

SEQ ID NO: 3004 - RNA, 19 nt, Artificial Sequence
  Description of Artificial Sequence: Synthetic oligonucleotide
guugucugcccccugcccc

SEQ ID NO: 3005 - RNA, 19 nt, Artificial Sequence
  Description of Artificial Sequence: Synthetic oligonucleotide
uugucugcccccugccccc

SEQ ID NO: 3006 - RNA, 19 nt, Artificial Sequence
  Description of Artificial Sequence: Synthetic oligonucleotide
ugucugcccccugccccca

SEQ ID NO: 3007 - RNA, 19 nt, Artificial Sequence
  Description of Artificial Sequence: Synthetic oligonucleotide
gucugcccccugcccccau

SEQ ID NO: 3008 - RNA, 19 nt, Artificial Sequence
  Description of Artificial Sequence: Synthetic oligonucleotide
ucugcccccugcccccauc

SEQ ID NO: 3009 - RNA, 19 nt, Artificial Sequence
  Description of Artificial Sequence: Synthetic oligonucleotide
cugcccccugcccccaucc

SEQ ID NO: 3010 - RNA, 19 nt, Artificial Sequence
  Description of Artificial Sequence: Synthetic oligonucleotide
ugcccccugcccccauccc

SEQ ID NO: 3011 - RNA, 19 nt, Artificial Sequence
  Description of Artificial Sequence: Synthetic oligonucleotide
gcccccugcccccaucccu

SEQ ID NO: 3012 - RNA, 19 nt, Artificial Sequence
  Description of Artificial Sequence: Synthetic oligonucleotide
cccccugcccccaucccug

SEQ ID NO: 3013 - RNA, 19 nt, Artificial Sequence
  Description of Artificial Sequence: Synthetic oligonucleotide
ccccugcccccaucccugc

SEQ ID NO: 3014 - RNA, 19 nt, Artificial Sequence
  Description of Artificial Sequence: Synthetic oligonucleotide
cccugcccccaucccugca

SEQ ID NO: 3015 - RNA, 19 nt, Artificial Sequence
  Description of Artificial Sequence: Synthetic oligonucleotide
ccugcccccaucccugcag

SEQ ID NO: 3016 - RNA, 19 nt, Artificial Sequence
  Description of Artificial Sequence: Synthetic oligonucleotide
cugcccccaucccugcagc

SEQ ID NO: 3017 - RNA, 19 nt, Artificial Sequence
  Description of Artificial Sequence: Synthetic oligonucleotide
ugcccccaucccugcagcu

SEQ ID NO: 3018 - RNA, 19 nt, Artificial Sequence
  Description of Artificial Sequence: Synthetic oligonucleotide
gcccccaucccugcagcuu

SEQ ID NO: 3019 - RNA, 19 nt, Artificial Sequence
  Description of Artificial Sequence: Synthetic oligonucleotide
cccccaucccugcagcuug

SEQ ID NO: 3020 - RNA, 19 nt, Artificial Sequence
  Description of Artificial Sequence: Synthetic oligonucleotide
ccccaucccugcagcuugg

SEQ ID NO: 3021 - RNA, 19 nt, Artificial Sequence
  Description of Artificial Sequence: Synthetic oligonucleotide
cccaucccugcagcuuggc

SEQ ID NO: 3022 - RNA, 19 nt, Artificial Sequence
  Description of Artificial Sequence: Synthetic oligonucleotide
ccaucccugcagcuuggcc

SEQ ID NO: 3023 - RNA, 19 nt, Artificial Sequence
  Description of Artificial Sequence: Synthetic oligonucleotide
caucccugcagcuuggcca

SEQ ID NO: 3024 - RNA, 19 nt, Artificial Sequence
  Description of Artificial Sequence: Synthetic oligonucleotide
aucccugcagcuuggccag

SEQ ID NO: 3025 - RNA, 19 nt, Artificial Sequence
  Description of Artificial Sequence: Synthetic oligonucleotide
ucccugcagcuuggccagg

SEQ ID NO: 3026 - RNA, 19 nt, Artificial Sequence
  Description of Artificial Sequence: Synthetic oligonucleotide
cccugcagcuuggccagga

SEQ ID NO: 3027 - RNA, 19 nt, Artificial Sequence
  Description of Artificial Sequence: Synthetic oligonucleotide
ccugcagcuuggccaggau

SEQ ID NO: 3028 - RNA, 19 nt, Artificial Sequence
  Description of Artificial Sequence: Synthetic oligonucleotide
cugcagcuuggccaggaug

SEQ ID NO: 3029 - RNA, 19 nt, Artificial Sequence
  Description of Artificial Sequence: Synthetic oligonucleotide
ugcagcuuggccaggaugg

SEQ ID NO: 3030 - RNA, 19 nt, Artificial Sequence
  Description of Artificial Sequence: Synthetic oligonucleotide
gcagcuuggccaggauggu

SEQ ID NO: 3031 - RNA, 19 nt, Artificial Sequence
  Description of Artificial Sequence: Synthetic oligonucleotide
cagcuuggccaggauggug

SEQ ID NO: 3032 - RNA, 19 nt, Artificial Sequence
  Description of Artificial Sequence: Synthetic oligonucleotide
agcuuggccaggauggugc

SEQ ID NO: 3033 - RNA, 19 nt, Artificial Sequence
  Description of Artificial Sequence: Synthetic oligonucleotide
gcuuggccaggauggugcc

SEQ ID NO: 3034 - RNA, 19 nt, Artificial Sequence
  Description of Artificial Sequence: Synthetic oligonucleotide
cuuggccaggauggugccc

SEQ ID NO: 3035 - RNA, 19 nt, Artificial Sequence
  Description of Artificial Sequence: Synthetic oligonucleotide
uuggccaggauggugcccc

SEQ ID NO: 3036 - RNA, 19 nt, Artificial Sequence
  Description of Artificial Sequence: Synthetic oligonucleotide
uggccaggauggugcccca

SEQ ID NO: 3037 - RNA, 19 nt, Artificial Sequence
  Description of Artificial Sequence: Synthetic oligonucleotide
ggccaggauggugccccau

SEQ ID NO: 3038 - RNA, 19 nt, Artificial Sequence
  Description of Artificial Sequence: Synthetic oligonucleotide
gccaggauggugccccauu

SEQ ID NO: 3039 - RNA, 19 nt, Artificial Sequence
  Description of Artificial Sequence: Synthetic oligonucleotide
ccaggauggugccccauug

SEQ ID NO: 3040 - RNA, 19 nt, Artificial Sequence
  Description of Artificial Sequence: Synthetic oligonucleotide
caggauggugccccauugc

SEQ ID NO: 3041 - RNA, 19 nt, Artificial Sequence
  Description of Artificial Sequence: Synthetic oligonucleotide
aggauggugccccauugca

SEQ ID NO: 3042 - RNA, 19 nt, Artificial Sequence
  Description of Artificial Sequence: Synthetic oligonucleotide
ggauggugccccauugcag

SEQ ID NO: 3043 - RNA, 19 nt, Artificial Sequence
  Description of Artificial Sequence: Synthetic oligonucleotide
gauggugccccauugcagg

SEQ ID NO: 3044 - RNA, 19 nt, Artificial Sequence
  Description of Artificial Sequence: Synthetic oligonucleotide
auggugccccauugcaggu

SEQ ID NO: 3045 - RNA, 19 nt, Artificial Sequence
  Description of Artificial Sequence: Synthetic oligonucleotide
uggugccccauugcagguc

SEQ ID NO: 3046 - RNA, 19 nt, Artificial Sequence
  Description of Artificial Sequence: Synthetic oligonucleotide
ggugccccauugcaggucu

SEQ ID NO: 3047 - RNA, 19 nt, Artificial Sequence
  Description of Artificial Sequence: Synthetic oligonucleotide
gugccccauugcaggucug

SEQ ID NO: 3048 - RNA, 19 nt, Artificial Sequence
  Description of Artificial Sequence: Synthetic oligonucleotide
ugccccauugcaggucugc

SEQ ID NO: 3049 - RNA, 19 nt, Artificial Sequence
  Description of Artificial Sequence: Synthetic oligonucleotide
gccccauugcaggucugcg

SEQ ID NO: 3050 - RNA, 19 nt, Artificial Sequence
  Description of Artificial Sequence: Synthetic oligonucleotide
ccccauugcaggucugcgu

SEQ ID NO: 3051 - RNA, 19 nt, Artificial Sequence
  Description of Artificial Sequence: Synthetic oligonucleotide
cccauugcaggucugcgua

SEQ ID NO: 3052 - RNA, 19 nt, Artificial Sequence
  Description of Artificial Sequence: Synthetic oligonucleotide
ccauugcaggucugcguag

SEQ ID NO: 3053 - RNA, 19 nt, Artificial Sequence
  Description of Artificial Sequence: Synthetic oligonucleotide
cauugcaggucugcguaga

SEQ ID NO: 3054 - RNA, 19 nt, Artificial Sequence
  Description of Artificial Sequence: Synthetic oligonucleotide
auugcaggucugcguagau

SEQ ID NO: 3055 - RNA, 19 nt, Artificial Sequence
  Description of Artificial Sequence: Synthetic oligonucleotide
uugcaggucugcguagaug

SEQ ID NO: 3056 - RNA, 19 nt, Artificial Sequence
  Description of Artificial Sequence: Synthetic oligonucleotide
ugcaggucugcguagaugg

SEQ ID NO: 3057 - RNA, 19 nt, Artificial Sequence
  Description of Artificial Sequence: Synthetic oligonucleotide
gcaggucugcguagauggu

SEQ ID NO: 3058 - RNA, 19 nt, Artificial Sequence
  Description of Artificial Sequence: Synthetic oligonucleotide
caggucugcguagauggug

SEQ ID NO: 3059 - RNA, 19 nt, Artificial Sequence
  Description of Artificial Sequence: Synthetic oligonucleotide
aggucugcguagaugguga

SEQ ID NO: 3060 - RNA, 19 nt, Artificial Sequence
  Description of Artificial Sequence: Synthetic oligonucleotide
ggucugcguagauggugaa

SEQ ID NO: 3061 - RNA, 19 nt, Artificial Sequence
  Description of Artificial Sequence: Synthetic oligonucleotide
gucugcguagauggugaau

SEQ ID NO: 3062 - RNA, 19 nt, Artificial Sequence
  Description of Artificial Sequence: Synthetic oligonucleotide
ucugcguagauggugaaug

SEQ ID NO: 3063 - RNA, 19 nt, Artificial Sequence
  Description of Artificial Sequence: Synthetic oligonucleotide
cugcguagauggugaaugu

SEQ ID NO: 3064 - RNA, 19 nt, Artificial Sequence
  Description of Artificial Sequence: Synthetic oligonucleotide
ugcguagauggugaauguc

SEQ ID NO: 3065 - RNA, 19 nt, Artificial Sequence
  Description of Artificial Sequence: Synthetic oligonucleotide
gcguagauggugaauguca

SEQ ID NO: 3066 - RNA, 19 nt, Artificial Sequence
  Description of Artificial Sequence: Synthetic oligonucleotide
cguagauggugaaugucau

SEQ ID NO: 3067 - RNA, 19 nt, Artificial Sequence
  Description of Artificial Sequence: Synthetic oligonucleotide
guagauggugaaugucaua

SEQ ID NO: 3068 - RNA, 19 nt, Artificial Sequence
  Description of Artificial Sequence: Synthetic oligonucleotide
uagauggugaaugucauau

SEQ ID NO: 3069 - RNA, 19 nt, Artificial Sequence
  Description of Artificial Sequence: Synthetic oligonucleotide
agauggugaaugucauauc

SEQ ID NO: 3070 - RNA, 19 nt, Artificial Sequence
  Description of Artificial Sequence: Synthetic oligonucleotide
gauggugaaugucauaucc

SEQ ID NO: 3071 - RNA, 19 nt, Artificial Sequence
  Description of Artificial Sequence: Synthetic oligonucleotide
auggugaaugucauauccu

SEQ ID NO: 3072 - RNA, 19 nt, Artificial Sequence
  Description of Artificial Sequence: Synthetic oligonucleotide
uggugaaugucauauccug

SEQ ID NO: 3073 - RNA, 19 nt, Artificial Sequence
  Description of Artificial Sequence: Synthetic oligonucleotide
ggugaaugucauauccugg

SEQ ID NO: 3074 - RNA, 19 nt, Artificial Sequence
  Description of Artificial Sequence: Synthetic oligonucleotide
gugaaugucauauccuggg

SEQ ID NO: 3075 - RNA, 19 nt, Artificial Sequence
  Description of Artificial Sequence: Synthetic oligonucleotide
ugaaugucauauccugggu

SEQ ID NO: 3076 - RNA, 19 nt, Artificial Sequence
  Description of Artificial Sequence: Synthetic oligonucleotide
gaaugucauauccugggua

SEQ ID NO: 3077 - RNA, 19 nt, Artificial Sequence
  Description of Artificial Sequence: Synthetic oligonucleotide
aaugucauauccuggguag

SEQ ID NO: 3078 - RNA, 19 nt, Artificial Sequence
  Description of Artificial Sequence: Synthetic oligonucleotide
augucauauccuggguaga

SEQ ID NO: 3079 - RNA, 19 nt, Artificial Sequence
  Description of Artificial Sequence: Synthetic oligonucleotide
ugucauauccuggguagag

SEQ ID NO: 3080 - RNA, 19 nt, Artificial Sequence
  Description of Artificial Sequence: Synthetic oligonucleotide
gucauauccuggguagagu

SEQ ID NO: 3081 - RNA, 19 nt, Artificial Sequence
  Description of Artificial Sequence: Synthetic oligonucleotide
ucauauccuggguagagug

SEQ ID NO: 3082 - RNA, 19 nt, Artificial Sequence
  Description of Artificial Sequence: Synthetic oligonucleotide
cauauccuggguagagugg

SEQ ID NO: 3083 - RNA, 19 nt, Artificial Sequence
  Description of Artificial Sequence: Synthetic oligonucleotide
auauccuggguagaguggu

SEQ ID NO: 3084 - RNA, 19 nt, Artificial Sequence
  Description of Artificial Sequence: Synthetic oligonucleotide
uauccuggguagaguggug

SEQ ID NO: 3085 - RNA, 19 nt, Artificial Sequence
  Description of Artificial Sequence: Synthetic oligonucleotide
auccuggguagaguggugc

SEQ ID NO: 3086 - RNA, 19 nt, Artificial Sequence
  Description of Artificial Sequence: Synthetic oligonucleotide
uccuggguagaguggugcg

SEQ ID NO: 3087 - RNA, 19 nt, Artificial Sequence
  Description of Artificial Sequence: Synthetic oligonucleotide
ccuggguagaguggugcgg

SEQ ID NO: 3088 - RNA, 19 nt, Artificial Sequence
  Description of Artificial Sequence: Synthetic oligonucleotide
cuggguagaguggugcggc

SEQ ID NO: 3089 - RNA, 19 nt, Artificial Sequence
  Description of Artificial Sequence: Synthetic oligonucleotide
uggguagaguggugcggcc

SEQ ID NO: 3090 - RNA, 19 nt, Artificial Sequence
  Description of Artificial Sequence: Synthetic oligonucleotide
ggguagaguggugcggcca

SEQ ID NO: 3091 - RNA, 19 nt, Artificial Sequence
  Description of Artificial Sequence: Synthetic oligonucleotide
gguagaguggugcggccag

SEQ ID NO: 3092 - RNA, 19 nt, Artificial Sequence
  Description of Artificial Sequence: Synthetic oligonucleotide
guagaguggugcggccagg

SEQ ID NO: 3093 - RNA, 19 nt, Artificial Sequence
  Description of Artificial Sequence: Synthetic oligonucleotide
uagaguggugcggccaggg

SEQ ID NO: 3094 - RNA, 19 nt, Artificial Sequence
  Description of Artificial Sequence: Synthetic oligonucleotide
agaguggugcggccagggc

SEQ ID NO: 3095 - RNA, 19 nt, Artificial Sequence
  Description of Artificial Sequence: Synthetic oligonucleotide
gaguggugcggccagggcc

SEQ ID NO: 3096 - RNA, 19 nt, Artificial Sequence
  Description of Artificial Sequence: Synthetic oligonucleotide
aguggugcggccagggcca

SEQ ID NO: 3097 - RNA, 19 nt, Artificial Sequence
  Description of Artificial Sequence: Synthetic oligonucleotide
guggugcggccagggccag

SEQ ID NO: 3098 - RNA, 19 nt, Artificial Sequence
  Description of Artificial Sequence: Synthetic oligonucleotide
uggugcggccagggccaga

SEQ ID NO: 3099 - RNA, 19 nt, Artificial Sequence
  Description of Artificial Sequence: Synthetic oligonucleotide
ggugcggccagggccagau

SEQ ID NO: 3100 - RNA, 19 nt, Artificial Sequence
  Description of Artificial Sequence: Synthetic oligonucleotide
gugcggccagggccagaug

SEQ ID NO: 3101 - RNA, 19 nt, Artificial Sequence
  Description of Artificial Sequence: Synthetic oligonucleotide
ugcggccagggccagaugg

SEQ ID NO: 3102 - RNA, 19 nt, Artificial Sequence
  Description of Artificial Sequence: Synthetic oligonucleotide
gcggccagggccagauggg

SEQ ID NO: 3103 - RNA, 19 nt, Artificial Sequence
  Description of Artificial Sequence: Synthetic oligonucleotide
cggccagggccagaugggg

SEQ ID NO: 3104 - RNA, 19 nt, Artificial Sequence
  Description of Artificial Sequence: Synthetic oligonucleotide
ggccagggccagauggggu

SEQ ID NO: 3105 - RNA, 19 nt, Artificial Sequence
  Description of Artificial Sequence: Synthetic oligonucleotide
gccagggccagaugggguc

SEQ ID NO: 3106 - RNA, 19 nt, Artificial Sequence
  Description of Artificial Sequence: Synthetic oligonucleotide
ccagggccagauggggucc

SEQ ID NO: 3107 - RNA, 19 nt, Artificial Sequence
  Description of Artificial Sequence: Synthetic oligonucleotide
cagggccagaugggguccc

SEQ ID NO: 3108 - RNA, 19 nt, Artificial Sequence
  Description of Artificial Sequence: Synthetic oligonucleotide
agggccagaugggguccca

SEQ ID NO: 3109 - RNA, 19 nt, Artificial Sequence
  Description of Artificial Sequence: Synthetic oligonucleotide
gggccagauggggucccac

SEQ ID NO: 3110 - RNA, 19 nt, Artificial Sequence
  Description of Artificial Sequence: Synthetic oligonucleotide
ggccagauggggucccaca

SEQ ID NO: 3111 - RNA, 19 nt, Artificial Sequence
  Description of Artificial Sequence: Synthetic oligonucleotide
gccagauggggucccacag

SEQ ID NO: 3112 - RNA, 19 nt, Artificial Sequence
  Description of Artificial Sequence: Synthetic oligonucleotide
ccagauggggucccacaga

SEQ ID NO: 3113 - RNA, 19 nt, Artificial Sequence
  Description of Artificial Sequence: Synthetic oligonucleotide
cagauggggucccacagag

SEQ ID NO: 3114 - RNA, 19 nt, Artificial Sequence
  Description of Artificial Sequence: Synthetic oligonucleotide
agauggggucccacagagc

SEQ ID NO: 3115 - RNA, 19 nt, Artificial Sequence
  Description of Artificial Sequence: Synthetic oligonucleotide
gauggggucccacagagca

SEQ ID NO: 3116 - RNA, 19 nt, Artificial Sequence
  Description of Artificial Sequence: Synthetic oligonucleotide
auggggucccacagagcac

SEQ ID NO: 3117 - RNA, 19 nt, Artificial Sequence
  Description of Artificial Sequence: Synthetic oligonucleotide
uggggucccacagagcacg

SEQ ID NO: 3118 - RNA, 19 nt, Artificial Sequence
  Description of Artificial Sequence: Synthetic oligonucleotide
ggggucccacagagcacgc

SEQ ID NO: 3119 - RNA, 19 nt, Artificial Sequence
  Description of Artificial Sequence: Synthetic oligonucleotide
gggucccacagagcacgcu

SEQ ID NO: 3120 - RNA, 19 nt, Artificial Sequence
  Description of Artificial Sequence: Synthetic oligonucleotide
ggucccacagagcacgcuc

SEQ ID NO: 3121 - RNA, 19 nt, Artificial Sequence
  Description of Artificial Sequence: Synthetic oligonucleotide
gucccacagagcacgcucc

SEQ ID NO: 3122 - RNA, 19 nt, Artificial Sequence
  Description of Artificial Sequence: Synthetic oligonucleotide
ucccacagagcacgcuccu

SEQ ID NO: 3123 - RNA, 19 nt, Artificial Sequence
  Description of Artificial Sequence: Synthetic oligonucleotide
cccacagagcacgcuccuu

SEQ ID NO: 3124 - RNA, 19 nt, Artificial Sequence
  Description of Artificial Sequence: Synthetic oligonucleotide
ccacagagcacgcuccuug

SEQ ID NO: 3125 - RNA, 19 nt, Artificial Sequence
  Description of Artificial Sequence: Synthetic oligonucleotide
cacagagcacgcuccuugg

SEQ ID NO: 3126 - RNA, 19 nt, Artificial Sequence
  Description of Artificial Sequence: Synthetic oligonucleotide
acagagcacgcuccuuggu

SEQ ID NO: 3127 - RNA, 19 nt, Artificial Sequence
  Description of Artificial Sequence: Synthetic oligonucleotide
cagagcacgcuccuuggua

SEQ ID NO: 3128 - RNA, 19 nt, Artificial Sequence
  Description of Artificial Sequence: Synthetic oligonucleotide
agagcacgcuccuugguau

SEQ ID NO: 3129 - RNA, 19 nt, Artificial Sequence
  Description of Artificial Sequence: Synthetic oligonucleotide
gagcacgcuccuugguauc

SEQ ID NO: 3130 - RNA, 19 nt, Artificial Sequence
  Description of Artificial Sequence: Synthetic oligonucleotide
agcacgcuccuugguaucc

SEQ ID NO: 3131 - RNA, 19 nt, Artificial Sequence
  Description of Artificial Sequence: Synthetic oligonucleotide
gcacgcuccuugguauccu

SEQ ID NO: 3132 - RNA, 19 nt, Artificial Sequence
  Description of Artificial Sequence: Synthetic oligonucleotide
cacgcuccuugguauccug

SEQ ID NO: 3133 - RNA, 19 nt, Artificial Sequence
  Description of Artificial Sequence: Synthetic oligonucleotide
acgcuccuugguauccugc

SEQ ID NO: 3134 - RNA, 19 nt, Artificial Sequence
  Description of Artificial Sequence: Synthetic oligonucleotide
cgcuccuugguauccugcu

SEQ ID NO: 3135 - RNA, 19 nt, Artificial Sequence
  Description of Artificial Sequence: Synthetic oligonucleotide
gcuccuugguauccugcug

SEQ ID NO: 3136 - RNA, 19 nt, Artificial Sequence
  Description of Artificial Sequence: Synthetic oligonucleotide
cuccuugguauccugcugc

SEQ ID NO: 3137 - RNA, 19 nt, Artificial Sequence
  Description of Artificial Sequence: Synthetic oligonucleotide
uccuugguauccugcugcc

SEQ ID NO: 3138 - RNA, 19 nt, Artificial Sequence
  Description of Artificial Sequence: Synthetic oligonucleotide
ccuugguauccugcugccu

SEQ ID NO: 3139 - RNA, 19 nt, Artificial Sequence
  Description of Artificial Sequence: Synthetic oligonucleotide
cuugguauccugcugccuu

SEQ ID NO: 3140 - RNA, 19 nt, Artificial Sequence
  Description of Artificial Sequence: Synthetic oligonucleotide
uugguauccugcugccuuu

SEQ ID NO: 3141 - RNA, 19 nt, Artificial Sequence
  Description of Artificial Sequence: Synthetic oligonucleotide
ugguauccugcugccuuug

SEQ ID NO: 3142 - RNA, 19 nt, Artificial Sequence
  Description of Artificial Sequence: Synthetic oligonucleotide
gguauccugcugccuuugc

SEQ ID NO: 3143 - RNA, 19 nt, Artificial Sequence
  Description of Artificial Sequence: Synthetic oligonucleotide
guauccugcugccuuugcu

SEQ ID NO: 3144 - RNA, 19 nt, Artificial Sequence
  Description of Artificial Sequence: Synthetic oligonucleotide
uauccugcugccuuugcug

SEQ ID NO: 3145 - RNA, 19 nt, Artificial Sequence
  Description of Artificial Sequence: Synthetic oligonucleotide
auccugcugccuuugcugc

SEQ ID NO: 3146 - RNA, 19 nt, Artificial Sequence
  Description of Artificial Sequence: Synthetic oligonucleotide
uccugcugccuuugcugcu

SEQ ID NO: 3147 - RNA, 19 nt, Artificial Sequence
  Description of Artificial Sequence: Synthetic oligonucleotide
ccugcugccuuugcugcug

SEQ ID NO: 3148 - RNA, 19 nt, Artificial Sequence
  Description of Artificial Sequence: Synthetic oligonucleotide
cugcugccuuugcugcugc

SEQ ID NO: 3149 - RNA, 19 nt, Artificial Sequence
  Description of Artificial Sequence: Synthetic oligonucleotide
ugcugccuuugcugcugcu

SEQ ID NO: 3150 - RNA, 19 nt, Artificial Sequence
  Description of Artificial Sequence: Synthetic oligonucleotide
gcugccuuugcugcugcuu

SEQ ID NO: 3151 - RNA, 19 nt, Artificial Sequence
  Description of Artificial Sequence: Synthetic oligonucleotide
cugccuuugcugcugcuug

SEQ ID NO: 3152 - RNA, 19 nt, Artificial Sequence
  Description of Artificial Sequence: Synthetic oligonucleotide
ugccuuugcugcugcuugu

SEQ ID NO: 3153 - RNA, 19 nt, Artificial Sequence
  Description of Artificial Sequence: Synthetic oligonucleotide
gccuuugcugcugcuugug

SEQ ID NO: 3154 - RNA, 19 nt, Artificial Sequence
  Description of Artificial Sequence: Synthetic oligonucleotide
ccuuugcugcugcuugugg

SEQ ID NO: 3155 - RNA, 19 nt, Artificial Sequence
  Description of Artificial Sequence: Synthetic oligonucleotide
cuuugcugcugcuuguggc

SEQ ID NO: 3156 - RNA, 19 nt, Artificial Sequence
  Description of Artificial Sequence: Synthetic oligonucleotide
uuugcugcugcuuguggcu

SEQ ID NO: 3157 - RNA, 19 nt, Artificial Sequence
  Description of Artificial Sequence: Synthetic oligonucleotide
uugcugcugcuuguggcug

SEQ ID NO: 3158 - RNA, 19 nt, Artificial Sequence
  Description of Artificial Sequence: Synthetic oligonucleotide
ugcugcugcuuguggcugc

SEQ ID NO: 3159 - RNA, 19 nt, Artificial Sequence
  Description of Artificial Sequence: Synthetic oligonucleotide
gcugcugcuuguggcugca

SEQ ID NO: 3160 - RNA, 19 nt, Artificial Sequence
  Description of Artificial Sequence: Synthetic oligonucleotide
cugcugcuuguggcugcac

SEQ ID NO: 3161 - RNA, 19 nt, Artificial Sequence
  Description of Artificial Sequence: Synthetic oligonucleotide
ugcugcuuguggcugcacu

SEQ ID NO: 3162 - RNA, 19 nt, Artificial Sequence
  Description of Artificial Sequence: Synthetic oligonucleotide
gcugcuuguggcugcacug

SEQ ID NO: 3163 - RNA, 19 nt, Artificial Sequence
  Description of Artificial Sequence: Synthetic oligonucleotide
cugcuuguggcugcacugg

SEQ ID NO: 3164 - RNA, 19 nt, Artificial Sequence
  Description of Artificial Sequence: Synthetic oligonucleotide
ugcuuguggcugcacuggc

SEQ ID NO: 3165 - RNA, 19 nt, Artificial Sequence
  Description of Artificial Sequence: Synthetic oligonucleotide
gcuuguggcugcacuggcg

SEQ ID NO: 3166 - RNA, 19 nt, Artificial Sequence
  Description of Artificial Sequence: Synthetic oligonucleotide
cuuguggcugcacuggcga

SEQ ID NO: 3167 - RNA, 19 nt, Artificial Sequence
  Description of Artificial Sequence: Synthetic oligonucleotide
uuguggcugcacuggcgac

SEQ ID NO: 3168 - RNA, 19 nt, Artificial Sequence
  Description of Artificial Sequence: Synthetic oligonucleotide
uguggcugcacuggcgacu

SEQ ID NO: 3169 - RNA, 19 nt, Artificial Sequence
  Description of Artificial Sequence: Synthetic oligonucleotide
guggcugcacuggcgacug

SEQ ID NO: 3170 - RNA, 19 nt, Artificial Sequence
  Description of Artificial Sequence: Synthetic oligonucleotide
uggcugcacuggcgacugc

SEQ ID NO: 3171 - RNA, 19 nt, Artificial Sequence
  Description of Artificial Sequence: Synthetic oligonucleotide
ggcugcacuggcgacugca

SEQ ID NO: 3172 - RNA, 19 nt, Artificial Sequence
  Description of Artificial Sequence: Synthetic oligonucleotide
gcugcacuggcgacugcac

SEQ ID NO: 3173 - RNA, 19 nt, Artificial Sequence
  Description of Artificial Sequence: Synthetic oligonucleotide
cugcacuggcgacugcacu

SEQ ID NO: 3174 - RNA, 19 nt, Artificial Sequence
  Description of Artificial Sequence: Synthetic oligonucleotide
ugcacuggcgacugcacug

SEQ ID NO: 3175 - RNA, 19 nt, Artificial Sequence
  Description of Artificial Sequence: Synthetic oligonucleotide
gcacuggcgacugcacugg

SEQ ID NO: 3176 - RNA, 19 nt, Artificial Sequence
  Description of Artificial Sequence: Synthetic oligonucleotide
cacuggcgacugcacuggu

SEQ ID NO: 3177 - RNA, 19 nt, Artificial Sequence
  Description of Artificial Sequence: Synthetic oligonucleotide
acuggcgacugcacugguc

SEQ ID NO: 3178 - RNA, 19 nt, Artificial Sequence
  Description of Artificial Sequence: Synthetic oligonucleotide
cuggcgacugcacuggucu

SEQ ID NO: 3179 - RNA, 19 nt, Artificial Sequence
  Description of Artificial Sequence: Synthetic oligonucleotide
uggcgacugcacuggucuu

SEQ ID NO: 3180 - RNA, 19 nt, Artificial Sequence
  Description of Artificial Sequence: Synthetic oligonucleotide
ggcgacugcacuggucuuc

SEQ ID NO: 3181 - RNA, 19 nt, Artificial Sequence
  Description of Artificial Sequence: Synthetic oligonucleotide
gcgacugcacuggucuuca

SEQ ID NO: 3182 - RNA, 19 nt, Artificial Sequence
  Description of Artificial Sequence: Synthetic oligonucleotide
cgacugcacuggucuucag

SEQ ID NO: 3183 - RNA, 19 nt, Artificial Sequence
  Description of Artificial Sequence: Synthetic oligonucleotide
gacugcacuggucuucagc

SEQ ID NO: 3184 - RNA, 19 nt, Artificial Sequence
  Description of Artificial Sequence: Synthetic oligonucleotide
acugcacuggucuucagcu

SEQ ID NO: 3185 - RNA, 19 nt, Artificial Sequence
  Description of Artificial Sequence: Synthetic oligonucleotide
cugcacuggucuucagcua

SEQ ID NO: 3186 - RNA, 19 nt, Artificial Sequence
  Description of Artificial Sequence: Synthetic oligonucleotide
ugcacuggucuucagcuac

SEQ ID NO: 3187 - RNA, 19 nt, Artificial Sequence
  Description of Artificial Sequence: Synthetic oligonucleotide
gcacuggucuucagcuacu

SEQ ID NO: 3188 - RNA, 19 nt, Artificial Sequence
  Description of Artificial Sequence: Synthetic oligonucleotide
cacuggucuucagcuacug

SEQ ID NO: 3189 - RNA, 19 nt, Artificial Sequence
  Description of Artificial Sequence: Synthetic oligonucleotide
acuggucuucagcuacugg

SEQ ID NO: 3190 - RNA, 19 nt, Artificial Sequence
  Description of Artificial Sequence: Synthetic oligonucleotide
cuggucuucagcuacuggu

SEQ ID NO: 3191 - RNA, 19 nt, Artificial Sequence
  Description of Artificial Sequence: Synthetic oligonucleotide
uggucuucagcuacuggug

SEQ ID NO: 3192 - RNA, 19 nt, Artificial Sequence
  Description of Artificial Sequence: Synthetic oligonucleotide
ggucuucagcuacuggugg

SEQ ID NO: 3193 - RNA, 19 nt, Artificial Sequence
  Description of Artificial Sequence: Synthetic oligonucleotide
gucuucagcuacugguggc

SEQ ID NO: 3194 - RNA, 19 nt, Artificial Sequence
  Description of Artificial Sequence: Synthetic oligonucleotide
ucuucagcuacugguggcg

SEQ ID NO: 3195 - RNA, 19 nt, Artificial Sequence
  Description of Artificial Sequence: Synthetic oligonucleotide
cuucagcuacugguggcgg

SEQ ID NO: 3196 - RNA, 19 nt, Artificial Sequence
  Description of Artificial Sequence: Synthetic oligonucleotide
uucagcuacugguggcgga

SEQ ID NO: 3197 - RNA, 19 nt, Artificial Sequence
  Description of Artificial Sequence: Synthetic oligonucleotide
ucagcuacugguggcggag

SEQ ID NO: 3198 - RNA, 19 nt, Artificial Sequence
  Description of Artificial Sequence: Synthetic oligonucleotide
cagcuacugguggcggagg

SEQ ID NO: 3199 - RNA, 19 nt, Artificial Sequence
  Description of Artificial Sequence: Synthetic oligonucleotide
agcuacugguggcggagga

SEQ ID NO: 3200 - RNA, 19 nt, Artificial Sequence
  Description of Artificial Sequence: Synthetic oligonucleotide
gcuacugguggcggaggaa

SEQ ID NO: 3201 - RNA, 19 nt, Artificial Sequence
  Description of Artificial Sequence: Synthetic oligonucleotide
cuacugguggcggaggaag

SEQ ID NO: 3202 - RNA, 19 nt, Artificial Sequence
  Description of Artificial Sequence: Synthetic oligonucleotide
uacugguggcggaggaagc

SEQ ID NO: 3203 - RNA, 19 nt, Artificial Sequence
  Description of Artificial Sequence: Synthetic oligonucleotide
acugguggcggaggaagca

SEQ ID NO: 3204 - RNA, 19 nt, Artificial Sequence
  Description of Artificial Sequence: Synthetic oligonucleotide
cugguggcggaggaagcag

SEQ ID NO: 3205 - RNA, 19 nt, Artificial Sequence
  Description of Artificial Sequence: Synthetic oligonucleotide
ugguggcggaggaagcagc

SEQ ID NO: 3206 - RNA, 19 nt, Artificial Sequence
  Description of Artificial Sequence: Synthetic oligonucleotide
gguggcggaggaagcagcu

SEQ ID NO: 3207 - RNA, 19 nt, Artificial Sequence
  Description of Artificial Sequence: Synthetic oligonucleotide
guggcggaggaagcagcua

SEQ ID NO: 3208 - RNA, 19 nt, Artificial Sequence
  Description of Artificial Sequence: Synthetic oligonucleotide
uggcggaggaagcagcuag

SEQ ID NO: 3209 - RNA, 19 nt, Artificial Sequence
  Description of Artificial Sequence: Synthetic oligonucleotide
ggcggaggaagcagcuagu

SEQ ID NO: 3210 - RNA, 19 nt, Artificial Sequence
  Description of Artificial Sequence: Synthetic oligonucleotide
gcggaggaagcagcuaguu

SEQ ID NO: 3211 - RNA, 19 nt, Artificial Sequence
  Description of Artificial Sequence: Synthetic oligonucleotide
cggaggaagcagcuaguuc

SEQ ID NO: 3212 - RNA, 19 nt, Artificial Sequence
  Description of Artificial Sequence: Synthetic oligonucleotide
ggaggaagcagcuaguucu

SEQ ID NO: 3213 - RNA, 19 nt, Artificial Sequence
  Description of Artificial Sequence: Synthetic oligonucleotide
gaggaagcagcuaguucuu

SEQ ID NO: 3214 - RNA, 19 nt, Artificial Sequence
  Description of Artificial Sequence: Synthetic oligonucleotide
aggaagcagcuaguucuuc

SEQ ID NO: 3215 - RNA, 19 nt, Artificial Sequence
  Description of Artificial Sequence: Synthetic oligonucleotide
ggaagcagcuaguucuucc

SEQ ID NO: 3216 - RNA, 19 nt, Artificial Sequence
  Description of Artificial Sequence: Synthetic oligonucleotide
gaagcagcuaguucuuccu

SEQ ID NO: 3217 - RNA, 19 nt, Artificial Sequence
  Description of Artificial Sequence: Synthetic oligonucleotide
aagcagcuaguucuuccuc

SEQ ID NO: 3218 - RNA, 19 nt, Artificial Sequence
  Description of Artificial Sequence: Synthetic oligonucleotide
agcagcuaguucuuccucc

SEQ ID NO: 3219 - RNA, 19 nt, Artificial Sequence
  Description of Artificial Sequence: Synthetic oligonucleotide
gcagcuaguucuuccuccc

SEQ ID NO: 3220 - RNA, 19 nt, Artificial Sequence
  Description of Artificial Sequence: Synthetic oligonucleotide
cagcuaguucuuccuccca

SEQ ID NO: 3221 - RNA, 19 nt, Artificial Sequence
  Description of Artificial Sequence: Synthetic oligonucleotide
agcuaguucuuccucccaa

SEQ ID NO: 3222 - RNA, 19 nt, Artificial Sequence
  Description of Artificial Sequence: Synthetic oligonucleotide
gcuaguucuuccucccaac

SEQ ID NO: 3223 - RNA, 19 nt, Artificial Sequence
  Description of Artificial Sequence: Synthetic oligonucleotide
cuaguucuuccucccaacc

SEQ ID NO: 3224 - RNA, 19 nt, Artificial Sequence
  Description of Artificial Sequence: Synthetic oligonucleotide
uaguucuuccucccaaccu

SEQ ID NO: 3225 - RNA, 19 nt, Artificial Sequence
  Description of Artificial Sequence: Synthetic oligonucleotide
aguucuuccucccaaccug

SEQ ID NO: 3226 - RNA, 19 nt, Artificial Sequence
  Description of Artificial Sequence: Synthetic oligonucleotide
guucuuccucccaaccuga

SEQ ID NO: 3227 - RNA, 19 nt, Artificial Sequence
  Description of Artificial Sequence: Synthetic oligonucleotide
uucuuccucccaaccugaa

SEQ ID NO: 3228 - RNA, 19 nt, Artificial Sequence
  Description of Artificial Sequence: Synthetic oligonucleotide
ucuuccucccaaccugaau

SEQ ID NO: 3229 - RNA, 19 nt, Artificial Sequence
  Description of Artificial Sequence: Synthetic oligonucleotide
cuuccucccaaccugaaug

SEQ ID NO: 3230 - RNA, 19 nt, Artificial Sequence
  Description of Artificial Sequence: Synthetic oligonucleotide
uuccucccaaccugaauga

SEQ ID NO: 3231 - RNA, 19 nt, Artificial Sequence
  Description of Artificial Sequence: Synthetic oligonucleotide
uccucccaaccugaaugac

SEQ ID NO: 3232 - RNA, 19 nt, Artificial Sequence
  Description of Artificial Sequence: Synthetic oligonucleotide
ccucccaaccugaaugacc

SEQ ID NO: 3233 - RNA, 19 nt, Artificial Sequence
  Description of Artificial Sequence: Synthetic oligonucleotide
cucccaaccugaaugaccu

SEQ ID NO: 3234 - RNA, 19 nt, Artificial Sequence
  Description of Artificial Sequence: Synthetic oligonucleotide
ucccaaccugaaugaccug

SEQ ID NO: 3235 - RNA, 19 nt, Artificial Sequence
  Description of Artificial Sequence: Synthetic oligonucleotide
cccaaccugaaugaccugg

SEQ ID NO: 3236 - RNA, 19 nt, Artificial Sequence
  Description of Artificial Sequence: Synthetic oligonucleotide
ccaaccugaaugaccuggc

SEQ ID NO: 3237 - RNA, 19 nt, Artificial Sequence
  Description of Artificial Sequence: Synthetic oligonucleotide
caaccugaaugaccuggca

SEQ ID NO: 3238 - RNA, 19 nt, Artificial Sequence
  Description of Artificial Sequence: Synthetic oligonucleotide
aaccugaaugaccuggcau

SEQ ID NO: 3239 - RNA, 19 nt, Artificial Sequence
  Description of Artificial Sequence: Synthetic oligonucleotide
accugaaugaccuggcauc

SEQ ID NO: 3240 - RNA, 19 nt, Artificial Sequence
  Description of Artificial Sequence: Synthetic oligonucleotide
ccugaaugaccuggcaucc

SEQ ID NO: 3241 - RNA, 19 nt, Artificial Sequence
  Description of Artificial Sequence: Synthetic oligonucleotide
cugaaugaccuggcauccc

SEQ ID NO: 3242 - RNA, 19 nt, Artificial Sequence
  Description of Artificial Sequence: Synthetic oligonucleotide
ugaaugaccuggcaucccu

SEQ ID NO: 3243 - RNA, 19 nt, Artificial Sequence
  Description of Artificial Sequence: Synthetic oligonucleotide
gaaugaccuggcaucccug

SEQ ID NO: 3244 - RNA, 19 nt, Artificial Sequence
  Description of Artificial Sequence: Synthetic oligonucleotide
aaugaccuggcaucccugg

SEQ ID NO: 3245 - RNA, 19 nt, Artificial Sequence
  Description of Artificial Sequence: Synthetic oligonucleotide
augaccuggcaucccugga

SEQ ID NO: 3246 - RNA, 19 nt, Artificial Sequence
  Description of Artificial Sequence: Synthetic oligonucleotide
ugaccuggcaucccuggac

SEQ ID NO: 3247 - RNA, 19 nt, Artificial Sequence
  Description of Artificial Sequence: Synthetic oligonucleotide
gaccuggcaucccuggacc

SEQ ID NO: 3248 - RNA, 19 nt, Artificial Sequence
  Description of Artificial Sequence: Synthetic oligonucleotide
accuggcaucccuggacca

SEQ ID NO: 3249 - RNA, 19 nt, Artificial Sequence
  Description of Artificial Sequence: Synthetic oligonucleotide
ccuggcaucccuggaccag

SEQ ID NO: 3250 - RNA, 19 nt, Artificial Sequence
  Description of Artificial Sequence: Synthetic oligonucleotide
cuggcaucccuggaccaga

SEQ ID NO: 3251 - RNA, 19 nt, Artificial Sequence
  Description of Artificial Sequence: Synthetic oligonucleotide
uggcaucccuggaccagac

SEQ ID NO: 3252 - RNA, 19 nt, Artificial Sequence
  Description of Artificial Sequence: Synthetic oligonucleotide
ggcaucccuggaccagacu

SEQ ID NO: 3253 - RNA, 19 nt, Artificial Sequence
  Description of Artificial Sequence: Synthetic oligonucleotide
gcaucccuggaccagacug

SEQ ID NO: 3254 - RNA, 19 nt, Artificial Sequence
  Description of Artificial Sequence: Synthetic oligonucleotide
caucccuggaccagacugc

SEQ ID NO: 3255 - RNA, 19 nt, Artificial Sequence
  Description of Artificial Sequence: Synthetic oligonucleotide
aucccuggaccagacugcu

SEQ ID NO: 3256 - RNA, 19 nt, Artificial Sequence
  Description of Artificial Sequence: Synthetic oligonucleotide
ucccuggaccagacugcug

SEQ ID NO: 3257 - RNA, 19 nt, Artificial Sequence
  Description of Artificial Sequence: Synthetic oligonucleotide
cccuggaccagacugcugg

SEQ ID NO: 3258 - RNA, 19 nt, Artificial Sequence
  Description of Artificial Sequence: Synthetic oligonucleotide
ccuggaccagacugcugga

SEQ ID NO: 3259 - RNA, 19 nt, Artificial Sequence
  Description of Artificial Sequence: Synthetic oligonucleotide
cuggaccagacugcuggag

SEQ ID NO: 3260 - RNA, 19 nt, Artificial Sequence
  Description of Artificial Sequence: Synthetic oligonucleotide
uggaccagacugcuggagc

SEQ ID NO: 3261 - RNA, 19 nt, Artificial Sequence
  Description of Artificial Sequence: Synthetic oligonucleotide
ggaccagacugcuggagcc

SEQ ID NO: 3262 - RNA, 19 nt, Artificial Sequence
  Description of Artificial Sequence: Synthetic oligonucleotide
gaccagacugcuggagcca

SEQ ID NO: 3263 - RNA, 19 nt, Artificial Sequence
  Description of Artificial Sequence: Synthetic oligonucleotide
accagacugcuggagccac

SEQ ID NO: 3264 - RNA, 19 nt, Artificial Sequence
  Description of Artificial Sequence: Synthetic oligonucleotide
ccagacugcuggagccaca

SEQ ID NO: 3265 - RNA, 19 nt, Artificial Sequence
  Description of Artificial Sequence: Synthetic oligonucleotide
cagacugcuggagccacac

SEQ ID NO: 3266 - RNA, 19 nt, Artificial Sequence
  Description of Artificial Sequence: Synthetic oligonucleotide
agacugcuggagccacacc

SEQ ID NO: 3267 - RNA, 19 nt, Artificial Sequence
  Description of Artificial Sequence: Synthetic oligonucleotide
gacugcuggagccacaccc

SEQ ID NO: 3268 - RNA, 19 nt, Artificial Sequence
  Description of Artificial Sequence: Synthetic oligonucleotide
acugcuggagccacacccc

SEQ ID NO: 3269 - RNA, 19 nt, Artificial Sequence
  Description of Artificial Sequence: Synthetic oligonucleotide
cugcuggagccacaccccu

SEQ ID NO: 3270 - RNA, 19 nt, Artificial Sequence
  Description of Artificial Sequence: Synthetic oligonucleotide
ugcuggagccacaccccug

SEQ ID NO: 3271 - RNA, 19 nt, Artificial Sequence
  Description of Artificial Sequence: Synthetic oligonucleotide
gcuggagccacaccccugc

SEQ ID NO: 3272 - RNA, 19 nt, Artificial Sequence
  Description of Artificial Sequence: Synthetic oligonucleotide
cuggagccacaccccugcc

SEQ ID NO: 3273 - RNA, 19 nt, Artificial Sequence
  Description of Artificial Sequence: Synthetic oligonucleotide
uggagccacaccccugccu

SEQ ID NO: 3274 - RNA, 19 nt, Artificial Sequence
  Description of Artificial Sequence: Synthetic oligonucleotide
ggagccacaccccugccua

SEQ ID NO: 3275 - RNA, 19 nt, Artificial Sequence
  Description of Artificial Sequence: Synthetic oligonucleotide
gagccacaccccugccuau

SEQ ID NO: 3276 - RNA, 19 nt, Artificial Sequence
  Description of Artificial Sequence: Synthetic oligonucleotide
agccacaccccugccuauu

SEQ ID NO: 3277 - RNA, 19 nt, Artificial Sequence
  Description of Artificial Sequence: Synthetic oligonucleotide
gccacaccccugccuauuc

SEQ ID NO: 3278 - RNA, 19 nt, Artificial Sequence
  Description of Artificial Sequence: Synthetic oligonucleotide
ccacaccccugccuauucu

SEQ ID NO: 3279 - RNA, 19 nt, Artificial Sequence
  Description of Artificial Sequence: Synthetic oligonucleotide
cacaccccugccuauucug

SEQ ID NO: 3280 - RNA, 19 nt, Artificial Sequence
  Description of Artificial Sequence: Synthetic oligonucleotide
acaccccugccuauucugu

SEQ ID NO: 3281 - RNA, 19 nt, Artificial Sequence
  Description of Artificial Sequence: Synthetic oligonucleotide
caccccugccuauucugua

SEQ ID NO: 3282 - RNA, 19 nt, Artificial Sequence
  Description of Artificial Sequence: Synthetic oligonucleotide
accccugccuauucuguac

SEQ ID NO: 3283 - RNA, 19 nt, Artificial Sequence
  Description of Artificial Sequence: Synthetic oligonucleotide
ccccugccuauucuguacu

SEQ ID NO: 3284 - RNA, 19 nt, Artificial Sequence
  Description of Artificial Sequence: Synthetic oligonucleotide
cccugccuauucuguacuc

SEQ ID NO: 3285 - RNA, 19 nt, Artificial Sequence
  Description of Artificial Sequence: Synthetic oligonucleotide
ccugccuauucuguacucg

SEQ ID NO: 3286 - RNA, 19 nt, Artificial Sequence
  Description of Artificial Sequence: Synthetic oligonucleotide
cugccuauucuguacucgg

SEQ ID NO: 3287 - RNA, 19 nt, Artificial Sequence
  Description of Artificial Sequence: Synthetic oligonucleotide
ugccuauucuguacucggg

SEQ ID NO: 3288 - RNA, 19 nt, Artificial Sequence
  Description of Artificial Sequence: Synthetic oligonucleotide
gccuauucuguacucgggc

SEQ ID NO: 3289 - RNA, 19 nt, Artificial Sequence
  Description of Artificial Sequence: Synthetic oligonucleotide
ccuauucuguacucgggcu

SEQ ID NO: 3290 - RNA, 19 nt, Artificial Sequence
  Description of Artificial Sequence: Synthetic oligonucleotide
cuauucuguacucgggcuc

SEQ ID NO: 3291 - RNA, 19 nt, Artificial Sequence
  Description of Artificial Sequence: Synthetic oligonucleotide
uauucuguacucgggcucu

SEQ ID NO: 3292 - RNA, 19 nt, Artificial Sequence
  Description of Artificial Sequence: Synthetic oligonucleotide
auucuguacucgggcucug

SEQ ID NO: 3293 - RNA, 19 nt, Artificial Sequence
  Description of Artificial Sequence: Synthetic oligonucleotide
uucuguacucgggcucuga

SEQ ID NO: 3294 - RNA, 19 nt, Artificial Sequence
  Description of Artificial Sequence: Synthetic oligonucleotide
ucuguacucgggcucugac

SEQ ID NO: 3295 - RNA, 19 nt, Artificial Sequence
  Description of Artificial Sequence: Synthetic oligonucleotide
cuguacucgggcucugacu

SEQ ID NO: 3296 - RNA, 19 nt, Artificial Sequence
  Description of Artificial Sequence: Synthetic oligonucleotide
uguacucgggcucugacua

SEQ ID NO: 3297 - RNA, 19 nt, Artificial Sequence
  Description of Artificial Sequence: Synthetic oligonucleotide
guacucgggcucugacuac

SEQ ID NO: 3298 - RNA, 19 nt, Artificial Sequence
  Description of Artificial Sequence: Synthetic oligonucleotide
uacucgggcucugacuaca

SEQ ID NO: 3299 - RNA, 19 nt, Artificial Sequence
  Description of Artificial Sequence: Synthetic oligonucleotide
acucgggcucugacuacag

SEQ ID NO: 3300 - RNA, 19 nt, Artificial Sequence
  Description of Artificial Sequence: Synthetic oligonucleotide
cucgggcucugacuacaga

SEQ ID NO: 3301 - RNA, 19 nt, Artificial Sequence
  Description of Artificial Sequence: Synthetic oligonucleotide
ucgggcucugacuacagaa

SEQ ID NO: 3302 - RNA, 19 nt, Artificial Sequence
  Description of Artificial Sequence: Synthetic oligonucleotide
cgggcucugacuacagaag

SEQ ID NO: 3303 - RNA, 19 nt, Artificial Sequence
  Description of Artificial Sequence: Synthetic oligonucleotide
gggcucugacuacagaagu

SEQ ID NO: 3304 - RNA, 19 nt, Artificial Sequence
  Description of Artificial Sequence: Synthetic oligonucleotide
ggcucugacuacagaagug

SEQ ID NO: 3305 - RNA, 19 nt, Artificial Sequence
  Description of Artificial Sequence: Synthetic oligonucleotide
gcucugacuacagaagugg

SEQ ID NO: 3306 - RNA, 19 nt, Artificial Sequence
  Description of Artificial Sequence: Synthetic oligonucleotide
cucugacuacagaaguggc

SEQ ID NO: 3307 - RNA, 19 nt, Artificial Sequence
  Description of Artificial Sequence: Synthetic oligonucleotide
ucugacuacagaaguggcc

SEQ ID NO: 3308 - RNA, 19 nt, Artificial Sequence
  Description of Artificial Sequence: Synthetic oligonucleotide
cugacuacagaaguggccu

SEQ ID NO: 3309 - RNA, 19 nt, Artificial Sequence
  Description of Artificial Sequence: Synthetic oligonucleotide
ugacuacagaaguggccuu

SEQ ID NO: 3310 - RNA, 19 nt, Artificial Sequence
  Description of Artificial Sequence: Synthetic oligonucleotide
gacuacagaaguggccuug

SEQ ID NO: 3311 - RNA, 19 nt, Artificial Sequence
  Description of Artificial Sequence: Synthetic oligonucleotide
acuacagaaguggccuugc

SEQ ID NO: 3312 - RNA, 19 nt, Artificial Sequence
  Description of Artificial Sequence: Synthetic oligonucleotide
cuacagaaguggccuugca

SEQ ID NO: 3313 - RNA, 19 nt, Artificial Sequence
  Description of Artificial Sequence: Synthetic oligonucleotide
uacagaaguggccuugcac

SEQ ID NO: 3314 - RNA, 19 nt, Artificial Sequence
  Description of Artificial Sequence: Synthetic oligonucleotide
acagaaguggccuugcacu

SEQ ID NO: 3315 - RNA, 19 nt, Artificial Sequence
  Description of Artificial Sequence: Synthetic oligonucleotide
cagaaguggccuugcacuc

SEQ ID NO: 3316 - RNA, 19 nt, Artificial Sequence
  Description of Artificial Sequence: Synthetic oligonucleotide
agaaguggccuugcacucc

SEQ ID NO: 3317 - RNA, 19 nt, Artificial Sequence
  Description of Artificial Sequence: Synthetic oligonucleotide
gaaguggccuugcacuccc

SEQ ID NO: 3318 - RNA, 19 nt, Artificial Sequence
  Description of Artificial Sequence: Synthetic oligonucleotide
aaguggccuugcacucccu

SEQ ID NO: 3319 - RNA, 19 nt, Artificial Sequence
  Description of Artificial Sequence: Synthetic oligonucleotide
aguggccuugcacucccug

SEQ ID NO: 3320 - RNA, 19 nt, Artificial Sequence
  Description of Artificial Sequence: Synthetic oligonucleotide
guggccuugcacucccugc

SEQ ID NO: 3321 - RNA, 19 nt, Artificial Sequence
  Description of Artificial Sequence: Synthetic oligonucleotide
uggccuugcacucccugcc

SEQ ID NO: 3322 - RNA, 19 nt, Artificial Sequence
  Description of Artificial Sequence: Synthetic oligonucleotide
ggccuugcacucccugcca

SEQ ID NO: 3323 - RNA, 19 nt, Artificial Sequence
  Description of Artificial Sequence: Synthetic oligonucleotide
gccuugcacucccugccau

SEQ ID NO: 3324 - RNA, 19 nt, Artificial Sequence
  Description of Artificial Sequence: Synthetic oligonucleotide
ccuugcacucccugccauu

SEQ ID NO: 3325 - RNA, 19 nt, Artificial Sequence
  Description of Artificial Sequence: Synthetic oligonucleotide
cuugcacucccugccauug

SEQ ID NO: 3326 - RNA, 19 nt, Artificial Sequence
  Description of Artificial Sequence: Synthetic oligonucleotide
uugcacucccugccauuga

SEQ ID NO: 3327 - RNA, 19 nt, Artificial Sequence
  Description of Artificial Sequence: Synthetic oligonucleotide
ugcacucccugccauugau

SEQ ID NO: 3328 - RNA, 19 nt, Artificial Sequence
  Description of Artificial Sequence: Synthetic oligonucleotide
gcacucccugccauugaug

SEQ ID NO: 3329 - RNA, 19 nt, Artificial Sequence
  Description of Artificial Sequence: Synthetic oligonucleotide
cacucccugccauugaugg

SEQ ID NO: 3330 - RNA, 19 nt, Artificial Sequence
  Description of Artificial Sequence: Synthetic oligonucleotide
acucccugccauugauggu

SEQ ID NO: 3331 - RNA, 19 nt, Artificial Sequence
  Description of Artificial Sequence: Synthetic oligonucleotide
cucccugccauugaugguc

SEQ ID NO: 3332 - RNA, 19 nt, Artificial Sequence
  Description of Artificial Sequence: Synthetic oligonucleotide
ucccugccauugauggucu

SEQ ID NO: 3333 - RNA, 19 nt, Artificial Sequence
  Description of Artificial Sequence: Synthetic oligonucleotide
cccugccauugauggucug

SEQ ID NO: 3334 - RNA, 19 nt, Artificial Sequence
  Description of Artificial Sequence: Synthetic oligonucleotide
ccugccauugauggucugg

SEQ ID NO: 3335 - RNA, 19 nt, Artificial Sequence
  Description of Artificial Sequence: Synthetic oligonucleotide
cugccauugauggucugga

SEQ ID NO: 3336 - RNA, 19 nt, Artificial Sequence
  Description of Artificial Sequence: Synthetic oligonucleotide
ugccauugauggucuggau

SEQ ID NO: 3337 - RNA, 19 nt, Artificial Sequence
  Description of Artificial Sequence: Synthetic oligonucleotide
gccauugauggucuggauu

SEQ ID NO: 3338 - RNA, 19 nt, Artificial Sequence
  Description of Artificial Sequence: Synthetic oligonucleotide
ccauugauggucuggauuc

SEQ ID NO: 3339 - RNA, 19 nt, Artificial Sequence
  Description of Artificial Sequence: Synthetic oligonucleotide
cauugauggucuggauucc

SEQ ID NO: 3340 - RNA, 19 nt, Artificial Sequence
  Description of Artificial Sequence: Synthetic oligonucleotide
auugauggucuggauucca

SEQ ID NO: 3341 - RNA, 19 nt, Artificial Sequence
  Description of Artificial Sequence: Synthetic oligonucleotide
uugauggucuggauuccac

SEQ ID NO: 3342 - RNA, 19 nt, Artificial Sequence
  Description of Artificial Sequence: Synthetic oligonucleotide
ugauggucuggauuccacc

SEQ ID NO: 3343 - RNA, 19 nt, Artificial Sequence
  Description of Artificial Sequence: Synthetic oligonucleotide
gauggucuggauuccacca

SEQ ID NO: 3344 - RNA, 19 nt, Artificial Sequence
  Description of Artificial Sequence: Synthetic oligonucleotide
auggucuggauuccaccac

SEQ ID NO: 3345 - RNA, 19 nt, Artificial Sequence
  Description of Artificial Sequence: Synthetic oligonucleotide
uggucuggauuccaccacu

SEQ ID NO: 3346 - RNA, 19 nt, Artificial Sequence
  Description of Artificial Sequence: Synthetic oligonucleotide
ggucuggauuccaccacuu

SEQ ID NO: 3347 - RNA, 19 nt, Artificial Sequence
  Description of Artificial Sequence: Synthetic oligonucleotide
gucuggauuccaccacuug

SEQ ID NO: 3348 - RNA, 19 nt, Artificial Sequence
  Description of Artificial Sequence: Synthetic oligonucleotide
ucuggauuccaccacuugu

SEQ ID NO: 3349 - RNA, 19 nt, Artificial Sequence
  Description of Artificial Sequence: Synthetic oligonucleotide
cuggauuccaccacuugug

SEQ ID NO: 3350 - RNA, 19 nt, Artificial Sequence
  Description of Artificial Sequence: Synthetic oligonucleotide
uggauuccaccacuugugu

SEQ ID NO: 3351 - RNA, 19 nt, Artificial Sequence
  Description of Artificial Sequence: Synthetic oligonucleotide
ggauuccaccacuuguguc

SEQ ID NO: 3352 - RNA, 19 nt, Artificial Sequence
  Description of Artificial Sequence: Synthetic oligonucleotide
gauuccaccacuugugucc

SEQ ID NO: 3353 - RNA, 19 nt, Artificial Sequence
  Description of Artificial Sequence: Synthetic oligonucleotide
auuccaccacuugugucca

SEQ ID NO: 3354 - RNA, 19 nt, Artificial Sequence
  Description of Artificial Sequence: Synthetic oligonucleotide
uuccaccacuuguguccau

SEQ ID NO: 3355 - RNA, 19 nt, Artificial Sequence
  Description of Artificial Sequence: Synthetic oligonucleotide
uccaccacuuguguccaug

SEQ ID NO: 3356 - RNA, 19 nt, Artificial Sequence
  Description of Artificial Sequence: Synthetic oligonucleotide
ccaccacuuguguccaugg

SEQ ID NO: 3357 - RNA, 19 nt, Artificial Sequence
  Description of Artificial Sequence: Synthetic oligonucleotide
caccacuuguguccaugga

SEQ ID NO: 3358 - RNA, 19 nt, Artificial Sequence
  Description of Artificial Sequence: Synthetic oligonucleotide
accacuuguguccauggag

SEQ ID NO: 3359 - RNA, 19 nt, Artificial Sequence
  Description of Artificial Sequence: Synthetic oligonucleotide
ccacuuguguccauggagc

SEQ ID NO: 3360 - RNA, 19 nt, Artificial Sequence
  Description of Artificial Sequence: Synthetic oligonucleotide
cacuuguguccauggagca

SEQ ID NO: 3361 - RNA, 19 nt, Artificial Sequence
  Description of Artificial Sequence: Synthetic oligonucleotide
acuuguguccauggagcau

SEQ ID NO: 3362 - RNA, 19 nt, Artificial Sequence
  Description of Artificial Sequence: Synthetic oligonucleotide
cuuguguccauggagcauc

SEQ ID NO: 3363 - RNA, 19 nt, Artificial Sequence
  Description of Artificial Sequence: Synthetic oligonucleotide
uuguguccauggagcaucc

SEQ ID NO: 3364 - RNA, 19 nt, Artificial Sequence
  Description of Artificial Sequence: Synthetic oligonucleotide
uguguccauggagcauccu

SEQ ID NO: 3365 - RNA, 19 nt, Artificial Sequence
  Description of Artificial Sequence: Synthetic oligonucleotide
guguccauggagcauccuu

SEQ ID NO: 3366 - RNA, 19 nt, Artificial Sequence
  Description of Artificial Sequence: Synthetic oligonucleotide
uguccauggagcauccuuc

SEQ ID NO: 3367 - RNA, 19 nt, Artificial Sequence
  Description of Artificial Sequence: Synthetic oligonucleotide
guccauggagcauccuucu

SEQ ID NO: 3368 - RNA, 19 nt, Artificial Sequence
  Description of Artificial Sequence: Synthetic oligonucleotide
uccauggagcauccuucuc

SEQ ID NO: 3369 - RNA, 19 nt, Artificial Sequence
  Description of Artificial Sequence: Synthetic oligonucleotide
ccauggagcauccuucucc

SEQ ID NO: 3370 - RNA, 19 nt, Artificial Sequence
  Description of Artificial Sequence: Synthetic oligonucleotide
cauggagcauccuucuccg

SEQ ID NO: 3371 - RNA, 19 nt, Artificial Sequence
  Description of Artificial Sequence: Synthetic oligonucleotide
auggagcauccuucuccga

SEQ ID NO: 3372 - RNA, 19 nt, Artificial Sequence
  Description of Artificial Sequence: Synthetic oligonucleotide
uggagcauccuucuccgau

SEQ ID NO: 3373 - RNA, 19 nt, Artificial Sequence
  Description of Artificial Sequence: Synthetic oligonucleotide
ggagcauccuucuccgaua

SEQ ID NO: 3374 - RNA, 19 nt, Artificial Sequence
  Description of Artificial Sequence: Synthetic oligonucleotide
gagcauccuucuccgauag

SEQ ID NO: 3375 - RNA, 19 nt, Artificial Sequence
  Description of Artificial Sequence: Synthetic oligonucleotide
agcauccuucuccgauagu

SEQ ID NO: 3376 - RNA, 19 nt, Artificial Sequence
  Description of Artificial Sequence: Synthetic oligonucleotide
gcauccuucuccgauagug

SEQ ID NO: 3377 - RNA, 19 nt, Artificial Sequence
  Description of Artificial Sequence: Synthetic oligonucleotide
cauccuucuccgauaguga

SEQ ID NO: 3378 - RNA, 19 nt, Artificial Sequence
  Description of Artificial Sequence: Synthetic oligonucleotide
auccuucuccgauagugaa

SEQ ID NO: 3379 - RNA, 19 nt, Artificial Sequence
  Description of Artificial Sequence: Synthetic oligonucleotide
uccuucuccgauagugaag

SEQ ID NO: 3380 - RNA, 19 nt, Artificial Sequence
  Description of Artificial Sequence: Synthetic oligonucleotide
ccuucuccgauagugaaga

SEQ ID NO: 3381 - RNA, 19 nt, Artificial Sequence
  Description of Artificial Sequence: Synthetic oligonucleotide
cuucuccgauagugaagau

SEQ ID NO: 3382 - RNA, 19 nt, Artificial Sequence
  Description of Artificial Sequence: Synthetic oligonucleotide
uucuccgauagugaagaug

SEQ ID NO: 3383 - RNA, 19 nt, Artificial Sequence
  Description of Artificial Sequence: Synthetic oligonucleotide
ucuccgauagugaagauga

SEQ ID NO: 3384 - RNA, 19 nt, Artificial Sequence
  Description of Artificial Sequence: Synthetic oligonucleotide
cuccgauagugaagaugaa

SEQ ID NO: 3385 - RNA, 19 nt, Artificial Sequence
  Description of Artificial Sequence: Synthetic oligonucleotide
uccgauagugaagaugaau

SEQ ID NO: 3386 - RNA, 19 nt, Artificial Sequence
  Description of Artificial Sequence: Synthetic oligonucleotide
ccgauagugaagaugaauc

SEQ ID NO: 3387 - RNA, 19 nt, Artificial Sequence
  Description of Artificial Sequence: Synthetic oligonucleotide
cgauagugaagaugaaucc

SEQ ID NO: 3388 - RNA, 19 nt, Artificial Sequence
  Description of Artificial Sequence: Synthetic oligonucleotide
gauagugaagaugaauccu

SEQ ID NO: 3389 - RNA, 19 nt, Artificial Sequence
  Description of Artificial Sequence: Synthetic oligonucleotide
auagugaagaugaauccug

SEQ ID NO: 3390 - RNA, 19 nt, Artificial Sequence
  Description of Artificial Sequence: Synthetic oligonucleotide
uagugaagaugaauccugu

SEQ ID NO: 3391 - RNA, 19 nt, Artificial Sequence
  Description of Artificial Sequence: Synthetic oligonucleotide
agugaagaugaauccugug

SEQ ID NO: 3392 - RNA, 19 nt, Artificial Sequence
  Description of Artificial Sequence: Synthetic oligonucleotide
gugaagaugaauccugugu

SEQ ID NO: 3393 - RNA, 19 nt, Artificial Sequence
  Description of Artificial Sequence: Synthetic oligonucleotide
ugaagaugaauccugugug

SEQ ID NO: 3394 - RNA, 19 nt, Artificial Sequence
  Description of Artificial Sequence: Synthetic oligonucleotide
gaagaugaauccugugugc

SEQ ID NO: 3395 - RNA, 19 nt, Artificial Sequence
  Description of Artificial Sequence: Synthetic oligonucleotide
aagaugaauccugugugcc

SEQ ID NO: 3396 - RNA, 19 nt, Artificial Sequence
  Description of Artificial Sequence: Synthetic oligonucleotide
agaugaauccugugugcca

SEQ ID NO: 3397 - RNA, 19 nt, Artificial Sequence
  Description of Artificial Sequence: Synthetic oligonucleotide
gaugaauccugugugccac

SEQ ID NO: 3398 - RNA, 19 nt, Artificial Sequence
  Description of Artificial Sequence: Synthetic oligonucleotide
augaauccugugugccacu

SEQ ID NO: 3399 - RNA, 19 nt, Artificial Sequence
  Description of Artificial Sequence: Synthetic oligonucleotide
ugaauccugugugccacug

SEQ ID NO: 3400 - RNA, 19 nt, Artificial Sequence
  Description of Artificial Sequence: Synthetic oligonucleotide
gaauccugugugccacugc

SEQ ID NO: 3401 - RNA, 19 nt, Artificial Sequence
  Description of Artificial Sequence: Synthetic oligonucleotide
aauccugugugccacugcu

SEQ ID NO: 3402 - RNA, 19 nt, Artificial Sequence
  Description of Artificial Sequence: Synthetic oligonucleotide
auccugugugccacugcug

SEQ ID NO: 3403 - RNA, 19 nt, Artificial Sequence
  Description of Artificial Sequence: Synthetic oligonucleotide
uccugugugccacugcugc

SEQ ID NO: 3404 - RNA, 19 nt, Artificial Sequence
  Description of Artificial Sequence: Synthetic oligonucleotide
ccugugugccacugcugcg

SEQ ID NO: 3405 - RNA, 19 nt, Artificial Sequence
  Description of Artificial Sequence: Synthetic oligonucleotide
cugugugccacugcugcgg

SEQ ID NO: 3406 - RNA, 19 nt, Artificial Sequence
  Description of Artificial Sequence: Synthetic oligonucleotide
ugugugccacugcugcgga

SEQ ID NO: 3407 - RNA, 19 nt, Artificial Sequence
  Description of Artificial Sequence: Synthetic oligonucleotide
gugugccacugcugcggaa

SEQ ID NO: 3408 - RNA, 19 nt, Artificial Sequence
  Description of Artificial Sequence: Synthetic oligonucleotide
ugugccacugcugcggaaa

SEQ ID NO: 3409 - RNA, 19 nt, Artificial Sequence
  Description of Artificial Sequence: Synthetic oligonucleotide
gugccacugcugcggaaag

SEQ ID NO: 3410 - RNA, 19 nt, Artificial Sequence
  Description of Artificial Sequence: Synthetic oligonucleotide
ugccacugcugcggaaaga

SEQ ID NO: 3411 - RNA, 19 nt, Artificial Sequence
  Description of Artificial Sequence: Synthetic oligonucleotide
gccacugcugcggaaagag

SEQ ID NO: 3412 - RNA, 19 nt, Artificial Sequence
  Description of Artificial Sequence: Synthetic oligonucleotide
ccacugcugcggaaagagu

SEQ ID NO: 3413 - RNA, 19 nt, Artificial Sequence
  Description of Artificial Sequence: Synthetic oligonucleotide
cacugcugcggaaagaguc

SEQ ID NO: 3414 - RNA, 19 nt, Artificial Sequence
  Description of Artificial Sequence: Synthetic oligonucleotide
acugcugcggaaagagucc

SEQ ID NO: 3415 - RNA, 19 nt, Artificial Sequence
  Description of Artificial Sequence: Synthetic oligonucleotide
cugcugcggaaagagucca

SEQ ID NO: 3416 - RNA, 19 nt, Artificial Sequence
  Description of Artificial Sequence: Synthetic oligonucleotide
ugcugcggaaagaguccau

SEQ ID NO: 3417 - RNA, 19 nt, Artificial Sequence
  Description of Artificial Sequence: Synthetic oligonucleotide
gcugcggaaagaguccauc

SEQ ID NO: 3418 - RNA, 19 nt, Artificial Sequence
  Description of Artificial Sequence: Synthetic oligonucleotide
cugcggaaagaguccaucc

SEQ ID NO: 3419 - RNA, 19 nt, Artificial Sequence
  Description of Artificial Sequence: Synthetic oligonucleotide
ugcggaaagaguccaucca

SEQ ID NO: 3420 - RNA, 19 nt, Artificial Sequence
  Description of Artificial Sequence: Synthetic oligonucleotide
gcggaaagaguccauccag

SEQ ID NO: 3421 - RNA, 19 nt, Artificial Sequence
  Description of Artificial Sequence: Synthetic oligonucleotide
cggaaagaguccauccagc

SEQ ID NO: 3422 - RNA, 19 nt, Artificial Sequence
  Description of Artificial Sequence: Synthetic oligonucleotide
ggaaagaguccauccagcu

SEQ ID NO: 3423 - RNA, 19 nt, Artificial Sequence
  Description of Artificial Sequence: Synthetic oligonucleotide
gaaagaguccauccagcua

SEQ ID NO: 3424 - RNA, 19 nt, Artificial Sequence
  Description of Artificial Sequence: Synthetic oligonucleotide
aaagaguccauccagcuaa

SEQ ID NO: 3425 - RNA, 19 nt, Artificial Sequence
  Description of Artificial Sequence: Synthetic oligonucleotide
aagaguccauccagcuaag

SEQ ID NO: 3426 - RNA, 19 nt, Artificial Sequence
  Description of Artificial Sequence: Synthetic oligonucleotide
agaguccauccagcuaagg

SEQ ID NO: 3427 - RNA, 19 nt, Artificial Sequence
  Description of Artificial Sequence: Synthetic oligonucleotide
gaguccauccagcuaaggg

SEQ ID NO: 3428 - RNA, 19 nt, Artificial Sequence
  Description of Artificial Sequence: Synthetic oligonucleotide
aguccauccagcuaaggga

SEQ ID NO: 3429 - RNA, 19 nt, Artificial Sequence
  Description of Artificial Sequence: Synthetic oligonucleotide
guccauccagcuaagggac

SEQ ID NO: 3430 - RNA, 19 nt, Artificial Sequence
  Description of Artificial Sequence: Synthetic oligonucleotide
uccauccagcuaagggacc

SEQ ID NO: 3431 - RNA, 19 nt, Artificial Sequence
  Description of Artificial Sequence: Synthetic oligonucleotide
ccauccagcuaagggaccu

SEQ ID NO: 3432 - RNA, 19 nt, Artificial Sequence
  Description of Artificial Sequence: Synthetic oligonucleotide
cauccagcuaagggaccug

SEQ ID NO: 3433 - RNA, 19 nt, Artificial Sequence
  Description of Artificial Sequence: Synthetic oligonucleotide
auccagcuaagggaccugg

SEQ ID NO: 3434 - RNA, 19 nt, Artificial Sequence
  Description of Artificial Sequence: Synthetic oligonucleotide
uccagcuaagggaccugga

SEQ ID NO: 3435 - RNA, 19 nt, Artificial Sequence
  Description of Artificial Sequence: Synthetic oligonucleotide
ccagcuaagggaccuggac

SEQ ID NO: 3436 - RNA, 19 nt, Artificial Sequence
  Description of Artificial Sequence: Synthetic oligonucleotide
cagcuaagggaccuggacu

SEQ ID NO: 3437 - RNA, 19 nt, Artificial Sequence
  Description of Artificial Sequence: Synthetic oligonucleotide
agcuaagggaccuggacuc

SEQ ID NO: 3438 - RNA, 19 nt, Artificial Sequence
  Description of Artificial Sequence: Synthetic oligonucleotide
gcuaagggaccuggacucu

SEQ ID NO: 3439 - RNA, 19 nt, Artificial Sequence
  Description of Artificial Sequence: Synthetic oligonucleotide
cuaagggaccuggacucug

SEQ ID NO: 3440 - RNA, 19 nt, Artificial Sequence
  Description of Artificial Sequence: Synthetic oligonucleotide
uaagggaccuggacucugc

SEQ ID NO: 3441 - RNA, 19 nt, Artificial Sequence
  Description of Artificial Sequence: Synthetic oligonucleotide
aagggaccuggacucugcg

SEQ ID NO: 3442 - RNA, 19 nt, Artificial Sequence
  Description of Artificial Sequence: Synthetic oligonucleotide
agggaccuggacucugcgc

SEQ ID NO: 3443 - RNA, 19 nt, Artificial Sequence
  Description of Artificial Sequence: Synthetic oligonucleotide
gggaccuggacucugcgcu

SEQ ID NO: 3444 - RNA, 19 nt, Artificial Sequence
  Description of Artificial Sequence: Synthetic oligonucleotide
ggaccuggacucugcgcuc

SEQ ID NO: 3445 - RNA, 19 nt, Artificial Sequence
  Description of Artificial Sequence: Synthetic oligonucleotide
gaccuggacucugcgcucu

SEQ ID NO: 3446 - RNA, 19 nt, Artificial Sequence
  Description of Artificial Sequence: Synthetic oligonucleotide
accuggacucugcgcucuu

SEQ ID NO: 3447 - RNA, 19 nt, Artificial Sequence
  Description of Artificial Sequence: Synthetic oligonucleotide
ccuggacucugcgcucuug

SEQ ID NO: 3448 - RNA, 19 nt, Artificial Sequence
  Description of Artificial Sequence: Synthetic oligonucleotide
cuggacucugcgcucuugg

SEQ ID NO: 3449 - RNA, 19 nt, Artificial Sequence
  Description of Artificial Sequence: Synthetic oligonucleotide
uggacucugcgcucuuggc

SEQ ID NO: 3450 - RNA, 19 nt, Artificial Sequence
  Description of Artificial Sequence: Synthetic oligonucleotide
ggacucugcgcucuuggcu

SEQ ID NO: 3451 - RNA, 19 nt, Artificial Sequence
  Description of Artificial Sequence: Synthetic oligonucleotide
gacucugcgcucuuggcug

SEQ ID NO: 3452 - RNA, 19 nt, Artificial Sequence
  Description of Artificial Sequence: Synthetic oligonucleotide
acucugcgcucuuggcuga

SEQ ID NO: 3453 - RNA, 19 nt, Artificial Sequence
  Description of Artificial Sequence: Synthetic oligonucleotide
cucugcgcucuuggcugag

SEQ ID NO: 3454 - RNA, 19 nt, Artificial Sequence
  Description of Artificial Sequence: Synthetic oligonucleotide
ucugcgcucuuggcugagg

SEQ ID NO: 3455 - RNA, 19 nt, Artificial Sequence
  Description of Artificial Sequence: Synthetic oligonucleotide
cugcgcucuuggcugaggu

SEQ ID NO: 3456 - RNA, 19 nt, Artificial Sequence
  Description of Artificial Sequence: Synthetic oligonucleotide
ugcgcucuuggcugagguc

SEQ ID NO: 3457 - RNA, 19 nt, Artificial Sequence
  Description of Artificial Sequence: Synthetic oligonucleotide
gcgcucuuggcugagguca

SEQ ID NO: 3458 - RNA, 19 nt, Artificial Sequence
  Description of Artificial Sequence: Synthetic oligonucleotide
cgcucuuggcugaggucaa

SEQ ID NO: 3459 - RNA, 19 nt, Artificial Sequence
  Description of Artificial Sequence: Synthetic oligonucleotide
gcucuuggcugaggucaag

SEQ ID NO: 3460 - RNA, 19 nt, Artificial Sequence
  Description of Artificial Sequence: Synthetic oligonucleotide
cucuuggcugaggucaagg

SEQ ID NO: 3461 - RNA, 19 nt, Artificial Sequence
  Description of Artificial Sequence: Synthetic oligonucleotide
ucuuggcugaggucaagga

SEQ ID NO: 3462 - RNA, 19 nt, Artificial Sequence
  Description of Artificial Sequence: Synthetic oligonucleotide
cuuggcugaggucaaggau

SEQ ID NO: 3463 - RNA, 19 nt, Artificial Sequence
  Description of Artificial Sequence: Synthetic oligonucleotide
uuggcugaggucaaggaug

SEQ ID NO: 3464 - RNA, 19 nt, Artificial Sequence
  Description of Artificial Sequence: Synthetic oligonucleotide
uggcugaggucaaggaugu

SEQ ID NO: 3465 - RNA, 19 nt, Artificial Sequence
  Description of Artificial Sequence: Synthetic oligonucleotide
ggcugaggucaaggaugug

SEQ ID NO: 3466 - RNA, 19 nt, Artificial Sequence
  Description of Artificial Sequence: Synthetic oligonucleotide
gcugaggucaaggaugugc

SEQ ID NO: 3467 - RNA, 19 nt, Artificial Sequence
  Description of Artificial Sequence: Synthetic oligonucleotide
cugaggucaaggaugugcu

SEQ ID NO: 3468 - RNA, 19 nt, Artificial Sequence
  Description of Artificial Sequence: Synthetic oligonucleotide
ugaggucaaggaugugcug

SEQ ID NO: 3469 - RNA, 19 nt, Artificial Sequence
  Description of Artificial Sequence: Synthetic oligonucleotide
gaggucaaggaugugcuga

SEQ ID NO: 3470 - RNA, 19 nt, Artificial Sequence
  Description of Artificial Sequence: Synthetic oligonucleotide
aggucaaggaugugcugau

SEQ ID NO: 3471 - RNA, 19 nt, Artificial Sequence
  Description of Artificial Sequence: Synthetic oligonucleotide
ggucaaggaugugcugauu

SEQ ID NO: 3472 - RNA, 19 nt, Artificial Sequence
  Description of Artificial Sequence: Synthetic oligonucleotide
gucaaggaugugcugauuc

SEQ ID NO: 3473 - RNA, 19 nt, Artificial Sequence
  Description of Artificial Sequence: Synthetic oligonucleotide
ucaaggaugugcugauucc

SEQ ID NO: 3474 - RNA, 19 nt, Artificial Sequence
  Description of Artificial Sequence: Synthetic oligonucleotide
caaggaugugcugauuccc

SEQ ID NO: 3475 - RNA, 19 nt, Artificial Sequence
  Description of Artificial Sequence: Synthetic oligonucleotide
aaggaugugcugauucccc

SEQ ID NO: 3476 - RNA, 19 nt, Artificial Sequence
  Description of Artificial Sequence: Synthetic oligonucleotide
aggaugugcugauucccca

SEQ ID NO: 3477 - RNA, 19 nt, Artificial Sequence
  Description of Artificial Sequence: Synthetic oligonucleotide
ggaugugcugauuccccau

SEQ ID NO: 3478 - RNA, 19 nt, Artificial Sequence
  Description of Artificial Sequence: Synthetic oligonucleotide
gaugugcugauuccccaug

SEQ ID NO: 3479 - RNA, 19 nt, Artificial Sequence
  Description of Artificial Sequence: Synthetic oligonucleotide
augugcugauuccccauga

SEQ ID NO: 3480 - RNA, 19 nt, Artificial Sequence
  Description of Artificial Sequence: Synthetic oligonucleotide
ugugcugauuccccaugag

SEQ ID NO: 3481 - RNA, 19 nt, Artificial Sequence
  Description of Artificial Sequence: Synthetic oligonucleotide
gugcugauuccccaugagc

SEQ ID NO: 3482 - RNA, 19 nt, Artificial Sequence
  Description of Artificial Sequence: Synthetic oligonucleotide
ugcugauuccccaugagcg

SEQ ID NO: 3483 - RNA, 19 nt, Artificial Sequence
  Description of Artificial Sequence: Synthetic oligonucleotide
gcugauuccccaugagcgg

SEQ ID NO: 3484 - RNA, 19 nt, Artificial Sequence
  Description of Artificial Sequence: Synthetic oligonucleotide
cugauuccccaugagcggg

SEQ ID NO: 3485 - RNA, 19 nt, Artificial Sequence
  Description of Artificial Sequence: Synthetic oligonucleotide
ugauuccccaugagcgggu

SEQ ID NO: 3486 - RNA, 19 nt, Artificial Sequence
  Description of Artificial Sequence: Synthetic oligonucleotide
gauuccccaugagcgggug

SEQ ID NO: 3487 - RNA, 19 nt, Artificial Sequence
  Description of Artificial Sequence: Synthetic oligonucleotide
auuccccaugagcgggugg

SEQ ID NO: 3488 - RNA, 19 nt, Artificial Sequence
  Description of Artificial Sequence: Synthetic oligonucleotide
uuccccaugagcggguggu

SEQ ID NO: 3489 - RNA, 19 nt, Artificial Sequence
  Description of Artificial Sequence: Synthetic oligonucleotide
uccccaugagcgggugguc

SEQ ID NO: 3490 - RNA, 19 nt, Artificial Sequence
  Description of Artificial Sequence: Synthetic oligonucleotide
ccccaugagcgggugguca

SEQ ID NO: 3491 - RNA, 19 nt, Artificial Sequence
  Description of Artificial Sequence: Synthetic oligonucleotide
cccaugagcggguggucac

SEQ ID NO: 3492 - RNA, 19 nt, Artificial Sequence
  Description of Artificial Sequence: Synthetic oligonucleotide
ccaugagcggguggucacc

SEQ ID NO: 3493 - RNA, 19 nt, Artificial Sequence
  Description of Artificial Sequence: Synthetic oligonucleotide
caugagcggguggucaccc

SEQ ID NO: 3494 - RNA, 19 nt, Artificial Sequence
  Description of Artificial Sequence: Synthetic oligonucleotide
augagcggguggucaccca

SEQ ID NO: 3495 - RNA, 19 nt, Artificial Sequence
  Description of Artificial Sequence: Synthetic oligonucleotide
ugagcggguggucacccac

SEQ ID NO: 3496 - RNA, 19 nt, Artificial Sequence
  Description of Artificial Sequence: Synthetic oligonucleotide
gagcggguggucacccaca

SEQ ID NO: 3497 - RNA, 19 nt, Artificial Sequence
  Description of Artificial Sequence: Synthetic oligonucleotide
agcggguggucacccacag

SEQ ID NO: 3498 - RNA, 19 nt, Artificial Sequence
  Description of Artificial Sequence: Synthetic oligonucleotide
gcggguggucacccacagu

SEQ ID NO: 3499 - RNA, 19 nt, Artificial Sequence
  Description of Artificial Sequence: Synthetic oligonucleotide
cggguggucacccacagug

SEQ ID NO: 3500 - RNA, 19 nt, Artificial Sequence
  Description of Artificial Sequence: Synthetic oligonucleotide
ggguggucacccacaguga

SEQ ID NO: 3501 - RNA, 19 nt, Artificial Sequence
  Description of Artificial Sequence: Synthetic oligonucleotide
gguggucacccacagugac

SEQ ID NO: 3502 - RNA, 19 nt, Artificial Sequence
  Description of Artificial Sequence: Synthetic oligonucleotide
guggucacccacagugacc

SEQ ID NO: 3503 - RNA, 19 nt, Artificial Sequence
  Description of Artificial Sequence: Synthetic oligonucleotide
uggucacccacagugaccg

SEQ ID NO: 3504 - RNA, 19 nt, Artificial Sequence
  Description of Artificial Sequence: Synthetic oligonucleotide
ggucacccacagugaccga

SEQ ID NO: 3505 - RNA, 19 nt, Artificial Sequence
  Description of Artificial Sequence: Synthetic oligonucleotide
gucacccacagugaccgag

SEQ ID NO: 3506 - RNA, 19 nt, Artificial Sequence
  Description of Artificial Sequence: Synthetic oligonucleotide
ucacccacagugaccgagu

SEQ ID NO: 3507 - RNA, 19 nt, Artificial Sequence
  Description of Artificial Sequence: Synthetic oligonucleotide
cacccacagugaccgaguc

SEQ ID NO: 3508 - RNA, 19 nt, Artificial Sequence
  Description of Artificial Sequence: Synthetic oligonucleotide
acccacagugaccgaguca

SEQ ID NO: 3509 - RNA, 19 nt, Artificial Sequence
  Description of Artificial Sequence: Synthetic oligonucleotide
cccacagugaccgagucau

SEQ ID NO: 3510 - RNA, 19 nt, Artificial Sequence
  Description of Artificial Sequence: Synthetic oligonucleotide
ccacagugaccgagucauu

SEQ ID NO: 3511 - RNA, 19 nt, Artificial Sequence
  Description of Artificial Sequence: Synthetic oligonucleotide
cacagugaccgagucauug

SEQ ID NO: 3512 - RNA, 19 nt, Artificial Sequence
  Description of Artificial Sequence: Synthetic oligonucleotide
acagugaccgagucauugg

SEQ ID NO: 3513 - RNA, 19 nt, Artificial Sequence
  Description of Artificial Sequence: Synthetic oligonucleotide
cagugaccgagucauuggc

SEQ ID NO: 3514 - RNA, 19 nt, Artificial Sequence
  Description of Artificial Sequence: Synthetic oligonucleotide
agugaccgagucauuggca

SEQ ID NO: 3515 - RNA, 19 nt, Artificial Sequence
  Description of Artificial Sequence: Synthetic oligonucleotide
gugaccgagucauuggcaa

SEQ ID NO: 3516 - RNA, 19 nt, Artificial Sequence
  Description of Artificial Sequence: Synthetic oligonucleotide
ugaccgagucauuggcaaa

SEQ ID NO: 3517 - RNA, 19 nt, Artificial Sequence
  Description of Artificial Sequence: Synthetic oligonucleotide
gaccgagucauuggcaaag

SEQ ID NO: 3518 - RNA, 19 nt, Artificial Sequence
  Description of Artificial Sequence: Synthetic oligonucleotide
accgagucauuggcaaagg

SEQ ID NO: 3519 - RNA, 19 nt, Artificial Sequence
  Description of Artificial Sequence: Synthetic oligonucleotide
ccgagucauuggcaaaggc

SEQ ID NO: 3520 - RNA, 19 nt, Artificial Sequence
  Description of Artificial Sequence: Synthetic oligonucleotide
cgagucauuggcaaaggcc

SEQ ID NO: 3521 - RNA, 19 nt, Artificial Sequence
  Description of Artificial Sequence: Synthetic oligonucleotide
gagucauuggcaaaggcca

SEQ ID NO: 3522 - RNA, 19 nt, Artificial Sequence
  Description of Artificial Sequence: Synthetic oligonucleotide
agucauuggcaaaggccac

SEQ ID NO: 3523 - RNA, 19 nt, Artificial Sequence
  Description of Artificial Sequence: Synthetic oligonucleotide
gucauuggcaaaggccacu

SEQ ID NO: 3524 - RNA, 19 nt, Artificial Sequence
  Description of Artificial Sequence: Synthetic oligonucleotide
ucauuggcaaaggccacuu

SEQ ID NO: 3525 - RNA, 19 nt, Artificial Sequence
  Description of Artificial Sequence: Synthetic oligonucleotide
cauuggcaaaggccacuuu

SEQ ID NO: 3526 - RNA, 19 nt, Artificial Sequence
  Description of Artificial Sequence: Synthetic oligonucleotide
auuggcaaaggccacuuug

SEQ ID NO: 3527 - RNA, 19 nt, Artificial Sequence
  Description of Artificial Sequence: Synthetic oligonucleotide
uuggcaaaggccacuuugg

SEQ ID NO: 3528 - RNA, 19 nt, Artificial Sequence
  Description of Artificial Sequence: Synthetic oligonucleotide
uggcaaaggccacuuugga

SEQ ID NO: 3529 - RNA, 19 nt, Artificial Sequence
  Description of Artificial Sequence: Synthetic oligonucleotide
ggcaaaggccacuuuggag

SEQ ID NO: 3530 - RNA, 19 nt, Artificial Sequence
  Description of Artificial Sequence: Synthetic oligonucleotide
gcaaaggccacuuuggagu

SEQ ID NO: 3531 - RNA, 19 nt, Artificial Sequence
  Description of Artificial Sequence: Synthetic oligonucleotide
caaaggccacuuuggaguu

SEQ ID NO: 3532 - RNA, 19 nt, Artificial Sequence
  Description of Artificial Sequence: Synthetic oligonucleotide
aaaggccacuuuggaguug

SEQ ID NO: 3533 - RNA, 19 nt, Artificial Sequence
  Description of Artificial Sequence: Synthetic oligonucleotide
aaggccacuuuggaguugu

SEQ ID NO: 3534 - RNA, 19 nt, Artificial Sequence
  Description of Artificial Sequence: Synthetic oligonucleotide
aggccacuuuggaguuguc

SEQ ID NO: 3535 - RNA, 19 nt, Artificial Sequence
  Description of Artificial Sequence: Synthetic oligonucleotide
ggccacuuuggaguugucu

SEQ ID NO: 3536 - RNA, 19 nt, Artificial Sequence
  Description of Artificial Sequence: Synthetic oligonucleotide
gccacuuuggaguugucua

SEQ ID NO: 3537 - RNA, 19 nt, Artificial Sequence
  Description of Artificial Sequence: Synthetic oligonucleotide
ccacuuuggaguugucuac

SEQ ID NO: 3538 - RNA, 19 nt, Artificial Sequence
  Description of Artificial Sequence: Synthetic oligonucleotide
cacuuuggaguugucuacc

SEQ ID NO: 3539 - RNA, 19 nt, Artificial Sequence
  Description of Artificial Sequence: Synthetic oligonucleotide
acuuuggaguugucuacca

SEQ ID NO: 3540 - RNA, 19 nt, Artificial Sequence
  Description of Artificial Sequence: Synthetic oligonucleotide
cuuuggaguugucuaccac

SEQ ID NO: 3541 - RNA, 19 nt, Artificial Sequence
  Description of Artificial Sequence: Synthetic oligonucleotide
uuuggaguugucuaccacg

SEQ ID NO: 3542 - RNA, 19 nt, Artificial Sequence
  Description of Artificial Sequence: Synthetic oligonucleotide
uuggaguugucuaccacgg

SEQ ID NO: 3543 - RNA, 19 nt, Artificial Sequence
  Description of Artificial Sequence: Synthetic oligonucleotide
uggaguugucuaccacgga

SEQ ID NO: 3544 - RNA, 19 nt, Artificial Sequence
  Description of Artificial Sequence: Synthetic oligonucleotide
ggaguugucuaccacggag

SEQ ID NO: 3545 - RNA, 19 nt, Artificial Sequence
  Description of Artificial Sequence: Synthetic oligonucleotide
gaguugucuaccacggaga

SEQ ID NO: 3546 - RNA, 19 nt, Artificial Sequence
  Description of Artificial Sequence: Synthetic oligonucleotide
aguugucuaccacggagaa

SEQ ID NO: 3547 - RNA, 19 nt, Artificial Sequence
  Description of Artificial Sequence: Synthetic oligonucleotide
guugucuaccacggagaau

SEQ ID NO: 3548 - RNA, 19 nt, Artificial Sequence
  Description of Artificial Sequence: Synthetic oligonucleotide
uugucuaccacggagaaua

SEQ ID NO: 3549 - RNA, 19 nt, Artificial Sequence
  Description of Artificial Sequence: Synthetic oligonucleotide
ugucuaccacggagaauac

SEQ ID NO: 3550 - RNA, 19 nt, Artificial Sequence
  Description of Artificial Sequence: Synthetic oligonucleotide
gucuaccacggagaauaca

SEQ ID NO: 3551 - RNA, 19 nt, Artificial Sequence
  Description of Artificial Sequence: Synthetic oligonucleotide
ucuaccacggagaauacau

SEQ ID NO: 3552 - RNA, 19 nt, Artificial Sequence
  Description of Artificial Sequence: Synthetic oligonucleotide
cuaccacggagaauacaua

SEQ ID NO: 3553 - RNA, 19 nt, Artificial Sequence
  Description of Artificial Sequence: Synthetic oligonucleotide
uaccacggagaauacauag

SEQ ID NO: 3554 - RNA, 19 nt, Artificial Sequence
  Description of Artificial Sequence: Synthetic oligonucleotide
accacggagaauacauaga

SEQ ID NO: 3555 - RNA, 19 nt, Artificial Sequence
  Description of Artificial Sequence: Synthetic oligonucleotide
ccacggagaauacauagac

SEQ ID NO: 3556 - RNA, 19 nt, Artificial Sequence
  Description of Artificial Sequence: Synthetic oligonucleotide
cacggagaauacauagacc

SEQ ID NO: 3557 - RNA, 19 nt, Artificial Sequence
  Description of Artificial Sequence: Synthetic oligonucleotide
acggagaauacauagacca

SEQ ID NO: 3558 - RNA, 19 nt, Artificial Sequence
  Description of Artificial Sequence: Synthetic oligonucleotide
cggagaauacauagaccag

SEQ ID NO: 3559 - RNA, 19 nt, Artificial Sequence
  Description of Artificial Sequence: Synthetic oligonucleotide
ggagaauacauagaccagg

SEQ ID NO: 3560 - RNA, 19 nt, Artificial Sequence
  Description of Artificial Sequence: Synthetic oligonucleotide
gagaauacauagaccaggc

SEQ ID NO: 3561 - RNA, 19 nt, Artificial Sequence
  Description of Artificial Sequence: Synthetic oligonucleotide
agaauacauagaccaggcc

SEQ ID NO: 3562 - RNA, 19 nt, Artificial Sequence
  Description of Artificial Sequence: Synthetic oligonucleotide
gaauacauagaccaggccc

SEQ ID NO: 3563 - RNA, 19 nt, Artificial Sequence
  Description of Artificial Sequence: Synthetic oligonucleotide
aauacauagaccaggccca

SEQ ID NO: 3564 - RNA, 19 nt, Artificial Sequence
  Description of Artificial Sequence: Synthetic oligonucleotide
auacauagaccaggcccag

SEQ ID NO: 3565 - RNA, 19 nt, Artificial Sequence
  Description of Artificial Sequence: Synthetic oligonucleotide
uacauagaccaggcccaga

SEQ ID NO: 3566 - RNA, 19 nt, Artificial Sequence
  Description of Artificial Sequence: Synthetic oligonucleotide
acauagaccaggcccagaa

SEQ ID NO: 3567 - RNA, 19 nt, Artificial Sequence
  Description of Artificial Sequence: Synthetic oligonucleotide
cauagaccaggcccagaau

SEQ ID NO: 3568 - RNA, 19 nt, Artificial Sequence
  Description of Artificial Sequence: Synthetic oligonucleotide
auagaccaggcccagaauc

SEQ ID NO: 3569 - RNA, 19 nt, Artificial Sequence
  Description of Artificial Sequence: Synthetic oligonucleotide
uagaccaggcccagaaucg

SEQ ID NO: 3570 - RNA, 19 nt, Artificial Sequence
  Description of Artificial Sequence: Synthetic oligonucleotide
agaccaggcccagaaucga

SEQ ID NO: 3571 - RNA, 19 nt, Artificial Sequence
  Description of Artificial Sequence: Synthetic oligonucleotide
gaccaggcccagaaucgaa

SEQ ID NO: 3572 - RNA, 19 nt, Artificial Sequence
  Description of Artificial Sequence: Synthetic oligonucleotide
accaggcccagaaucgaau

SEQ ID NO: 3573 - RNA, 19 nt, Artificial Sequence
  Description of Artificial Sequence: Synthetic oligonucleotide
ccaggcccagaaucgaauc

SEQ ID NO: 3574 - RNA, 19 nt, Artificial Sequence
  Description of Artificial Sequence: Synthetic oligonucleotide
caggcccagaaucgaaucc

SEQ ID NO: 3575 - RNA, 19 nt, Artificial Sequence
  Description of Artificial Sequence: Synthetic oligonucleotide
aggcccagaaucgaaucca

SEQ ID NO: 3576 - RNA, 19 nt, Artificial Sequence
  Description of Artificial Sequence: Synthetic oligonucleotide
ggcccagaaucgaauccaa

SEQ ID NO: 3577 - RNA, 19 nt, Artificial Sequence
  Description of Artificial Sequence: Synthetic oligonucleotide
gcccagaaucgaauccaau

SEQ ID NO: 3578 - RNA, 19 nt, Artificial Sequence
  Description of Artificial Sequence: Synthetic oligonucleotide
cccagaaucgaauccaaug

SEQ ID NO: 3579 - RNA, 19 nt, Artificial Sequence
  Description of Artificial Sequence: Synthetic oligonucleotide
ccagaaucgaauccaaugu

SEQ ID NO: 3580 - RNA, 19 nt, Artificial Sequence
  Description of Artificial Sequence: Synthetic oligonucleotide
cagaaucgaauccaaugug

SEQ ID NO: 3581 - RNA, 19 nt, Artificial Sequence
  Description of Artificial Sequence: Synthetic oligonucleotide
agaaucgaauccaaugugc

SEQ ID NO: 3582 - RNA, 19 nt, Artificial Sequence
  Description of Artificial Sequence: Synthetic oligonucleotide
gaaucgaauccaaugugcc

SEQ ID NO: 3583 - RNA, 19 nt, Artificial Sequence
  Description of Artificial Sequence: Synthetic oligonucleotide
aaucgaauccaaugugcca

SEQ ID NO: 3584 - RNA, 19 nt, Artificial Sequence
  Description of Artificial Sequence: Synthetic oligonucleotide
aucgaauccaaugugccau

SEQ ID NO: 3585 - RNA, 19 nt, Artificial Sequence
  Description of Artificial Sequence: Synthetic oligonucleotide
ucgaauccaaugugccauc

SEQ ID NO: 3586 - RNA, 19 nt, Artificial Sequence
  Description of Artificial Sequence: Synthetic oligonucleotide
cgaauccaaugugccauca

SEQ ID NO: 3587 - RNA, 19 nt, Artificial Sequence
  Description of Artificial Sequence: Synthetic oligonucleotide
gaauccaaugugccaucaa

SEQ ID NO: 3588 - RNA, 19 nt, Artificial Sequence
  Description of Artificial Sequence: Synthetic oligonucleotide
aauccaaugugccaucaag

SEQ ID NO: 3589 - RNA, 19 nt, Artificial Sequence
  Description of Artificial Sequence: Synthetic oligonucleotide
auccaaugugccaucaagu

SEQ ID NO: 3590 - RNA, 19 nt, Artificial Sequence
  Description of Artificial Sequence: Synthetic oligonucleotide
uccaaugugccaucaaguc

SEQ ID NO: 3591 - RNA, 19 nt, Artificial Sequence
  Description of Artificial Sequence: Synthetic oligonucleotide
ccaaugugccaucaaguca

SEQ ID NO: 3592 - RNA, 19 nt, Artificial Sequence
  Description of Artificial Sequence: Synthetic oligonucleotide
caaugugccaucaagucac

SEQ ID NO: 3593 - RNA, 19 nt, Artificial Sequence
  Description of Artificial Sequence: Synthetic oligonucleotide
aaugugccaucaagucacu

SEQ ID NO: 3594 - RNA, 19 nt, Artificial Sequence
  Description of Artificial Sequence: Synthetic oligonucleotide
augugccaucaagucacua

SEQ ID NO: 3595 - RNA, 19 nt, Artificial Sequence
  Description of Artificial Sequence: Synthetic oligonucleotide
ugugccaucaagucacuaa

SEQ ID NO: 3596 - RNA, 19 nt, Artificial Sequence
  Description of Artificial Sequence: Synthetic oligonucleotide
gugccaucaagucacuaag

SEQ ID NO: 3597 - RNA, 19 nt, Artificial Sequence
  Description of Artificial Sequence: Synthetic oligonucleotide
ugccaucaagucacuaagu

SEQ ID NO: 3598 - RNA, 19 nt, Artificial Sequence
  Description of Artificial Sequence: Synthetic oligonucleotide
gccaucaagucacuaaguc

SEQ ID NO: 3599 - RNA, 19 nt, Artificial Sequence
  Description of Artificial Sequence: Synthetic oligonucleotide
ccaucaagucacuaagucg

SEQ ID NO: 3600 - RNA, 19 nt, Artificial Sequence
  Description of Artificial Sequence: Synthetic oligonucleotide
caucaagucacuaagucgc

SEQ ID NO: 3601 - RNA, 19 nt, Artificial Sequence
  Description of Artificial Sequence: Synthetic oligonucleotide
aucaagucacuaagucgca

SEQ ID NO: 3602 - RNA, 19 nt, Artificial Sequence
  Description of Artificial Sequence: Synthetic oligonucleotide
ucaagucacuaagucgcau

SEQ ID NO: 3603 - RNA, 19 nt, Artificial Sequence
  Description of Artificial Sequence: Synthetic oligonucleotide
caagucacuaagucgcauc

SEQ ID NO: 3604 - RNA, 19 nt, Artificial Sequence
  Description of Artificial Sequence: Synthetic oligonucleotide
aagucacuaagucgcauca

SEQ ID NO: 3605 - RNA, 19 nt, Artificial Sequence
  Description of Artificial Sequence: Synthetic oligonucleotide
agucacuaagucgcaucac

SEQ ID NO: 3606 - RNA, 19 nt, Artificial Sequence
  Description of Artificial Sequence: Synthetic oligonucleotide
gucacuaagucgcaucaca

SEQ ID NO: 3607 - RNA, 19 nt, Artificial Sequence
  Description of Artificial Sequence: Synthetic oligonucleotide
ucacuaagucgcaucacag

SEQ ID NO: 3608 - RNA, 19 nt, Artificial Sequence
  Description of Artificial Sequence: Synthetic oligonucleotide
cacuaagucgcaucacaga

SEQ ID NO: 3609 - RNA, 19 nt, Artificial Sequence
  Description of Artificial Sequence: Synthetic oligonucleotide
acuaagucgcaucacagag

SEQ ID NO: 3610 - RNA, 19 nt, Artificial Sequence
  Description of Artificial Sequence: Synthetic oligonucleotide
cuaagucgcaucacagaga

SEQ ID NO: 3611 - RNA, 19 nt, Artificial Sequence
  Description of Artificial Sequence: Synthetic oligonucleotide
uaagucgcaucacagagau

SEQ ID NO: 3612 - RNA, 19 nt, Artificial Sequence
  Description of Artificial Sequence: Synthetic oligonucleotide
aagucgcaucacagagaug

SEQ ID NO: 3613 - RNA, 19 nt, Artificial Sequence
  Description of Artificial Sequence: Synthetic oligonucleotide
agucgcaucacagagaugc

SEQ ID NO: 3614 - RNA, 19 nt, Artificial Sequence
  Description of Artificial Sequence: Synthetic oligonucleotide
gucgcaucacagagaugca

SEQ ID NO: 3615 - RNA, 19 nt, Artificial Sequence
  Description of Artificial Sequence: Synthetic oligonucleotide
ucgcaucacagagaugcag

SEQ ID NO: 3616 - RNA, 19 nt, Artificial Sequence
  Description of Artificial Sequence: Synthetic oligonucleotide
cgcaucacagagaugcagc

SEQ ID NO: 3617 - RNA, 19 nt, Artificial Sequence
  Description of Artificial Sequence: Synthetic oligonucleotide
gcaucacagagaugcagca

SEQ ID NO: 3618 - RNA, 19 nt, Artificial Sequence
  Description of Artificial Sequence: Synthetic oligonucleotide
caucacagagaugcagcag

SEQ ID NO: 3619 - RNA, 19 nt, Artificial Sequence
  Description of Artificial Sequence: Synthetic oligonucleotide
aucacagagaugcagcagg

SEQ ID NO: 3620 - RNA, 19 nt, Artificial Sequence
  Description of Artificial Sequence: Synthetic oligonucleotide
ucacagagaugcagcaggu

SEQ ID NO: 3621 - RNA, 19 nt, Artificial Sequence
  Description of Artificial Sequence: Synthetic oligonucleotide
cacagagaugcagcaggug

SEQ ID NO: 3622 - RNA, 19 nt, Artificial Sequence
  Description of Artificial Sequence: Synthetic oligonucleotide
acagagaugcagcaggugg

SEQ ID NO: 3623 - RNA, 19 nt, Artificial Sequence
  Description of Artificial Sequence: Synthetic oligonucleotide
cagagaugcagcaggugga

SEQ ID NO: 3624 - RNA, 19 nt, Artificial Sequence
  Description of Artificial Sequence: Synthetic oligonucleotide
agagaugcagcagguggag

SEQ ID NO: 3625 - RNA, 19 nt, Artificial Sequence
  Description of Artificial Sequence: Synthetic oligonucleotide
gagaugcagcagguggagg

SEQ ID NO: 3626 - RNA, 19 nt, Artificial Sequence
  Description of Artificial Sequence: Synthetic oligonucleotide
agaugcagcagguggaggc

SEQ ID NO: 3627 - RNA, 19 nt, Artificial Sequence
  Description of Artificial Sequence: Synthetic oligonucleotide
gaugcagcagguggaggcc

SEQ ID NO: 3628 - RNA, 19 nt, Artificial Sequence
  Description of Artificial Sequence: Synthetic oligonucleotide
augcagcagguggaggccu

SEQ ID NO: 3629 - RNA, 19 nt, Artificial Sequence
  Description of Artificial Sequence: Synthetic oligonucleotide
ugcagcagguggaggccuu

SEQ ID NO: 3630 - RNA, 19 nt, Artificial Sequence
  Description of Artificial Sequence: Synthetic oligonucleotide
gcagcagguggaggccuuc

SEQ ID NO: 3631 - RNA, 19 nt, Artificial Sequence
  Description of Artificial Sequence: Synthetic oligonucleotide
cagcagguggaggccuucc

SEQ ID NO: 3632 - RNA, 19 nt, Artificial Sequence
  Description of Artificial Sequence: Synthetic oligonucleotide
agcagguggaggccuuccu

SEQ ID NO: 3633 - RNA, 19 nt, Artificial Sequence
  Description of Artificial Sequence: Synthetic oligonucleotide
gcagguggaggccuuccug

SEQ ID NO: 3634 - RNA, 19 nt, Artificial Sequence
  Description of Artificial Sequence: Synthetic oligonucleotide
cagguggaggccuuccugc

SEQ ID NO: 3635 - RNA, 19 nt, Artificial Sequence
  Description of Artificial Sequence: Synthetic oligonucleotide
agguggaggccuuccugcg

SEQ ID NO: 3636 - RNA, 19 nt, Artificial Sequence
  Description of Artificial Sequence: Synthetic oligonucleotide
gguggaggccuuccugcga

SEQ ID NO: 3637 - RNA, 19 nt, Artificial Sequence
  Description of Artificial Sequence: Synthetic oligonucleotide
guggaggccuuccugcgag

SEQ ID NO: 3638 - RNA, 19 nt, Artificial Sequence
  Description of Artificial Sequence: Synthetic oligonucleotide
uggaggccuuccugcgaga

SEQ ID NO: 3639 - RNA, 19 nt, Artificial Sequence
  Description of Artificial Sequence: Synthetic oligonucleotide
ggaggccuuccugcgagag

SEQ ID NO: 3640 - RNA, 19 nt, Artificial Sequence
  Description of Artificial Sequence: Synthetic oligonucleotide
gaggccuuccugcgagagg

SEQ ID NO: 3641 - RNA, 19 nt, Artificial Sequence
  Description of Artificial Sequence: Synthetic oligonucleotide
aggccuuccugcgagaggg

SEQ ID NO: 3642 - RNA, 19 nt, Artificial Sequence
  Description of Artificial Sequence: Synthetic oligonucleotide
ggccuuccugcgagagggg

SEQ ID NO: 3643 - RNA, 19 nt, Artificial Sequence
  Description of Artificial Sequence: Synthetic oligonucleotide
gccuuccugcgagaggggc

SEQ ID NO: 3644 - RNA, 19 nt, Artificial Sequence
  Description of Artificial Sequence: Synthetic oligonucleotide
ccuuccugcgagaggggcu

SEQ ID NO: 3645 - RNA, 19 nt, Artificial Sequence
  Description of Artificial Sequence: Synthetic oligonucleotide
cuuccugcgagaggggcug

SEQ ID NO: 3646 - RNA, 19 nt, Artificial Sequence
  Description of Artificial Sequence: Synthetic oligonucleotide
uuccugcgagaggggcugc

SEQ ID NO: 3647 - RNA, 19 nt, Artificial Sequence
  Description of Artificial Sequence: Synthetic oligonucleotide
uccugcgagaggggcugcu

SEQ ID NO: 3648 - RNA, 19 nt, Artificial Sequence
  Description of Artificial Sequence: Synthetic oligonucleotide
ccugcgagaggggcugcuc

SEQ ID NO: 3649 - RNA, 19 nt, Artificial Sequence
  Description of Artificial Sequence: Synthetic oligonucleotide
cugcgagaggggcugcuca

SEQ ID NO: 3650 - RNA, 19 nt, Artificial Sequence
  Description of Artificial Sequence: Synthetic oligonucleotide
ugcgagaggggcugcucau

SEQ ID NO: 3651 - RNA, 19 nt, Artificial Sequence
  Description of Artificial Sequence: Synthetic oligonucleotide
gcgagaggggcugcucaug

SEQ ID NO: 3652 - RNA, 19 nt, Artificial Sequence
  Description of Artificial Sequence: Synthetic oligonucleotide
cgagaggggcugcucaugc

SEQ ID NO: 3653 - RNA, 19 nt, Artificial Sequence
  Description of Artificial Sequence: Synthetic oligonucleotide
gagaggggcugcucaugcg

SEQ ID NO: 3654 - RNA, 19 nt, Artificial Sequence
  Description of Artificial Sequence: Synthetic oligonucleotide
agaggggcugcucaugcgu

SEQ ID NO: 3655 - RNA, 19 nt, Artificial Sequence
  Description of Artificial Sequence: Synthetic oligonucleotide
gaggggcugcucaugcgug

SEQ ID NO: 3656 - RNA, 19 nt, Artificial Sequence
  Description of Artificial Sequence: Synthetic oligonucleotide
aggggcugcucaugcgugg

SEQ ID NO: 3657 - RNA, 19 nt, Artificial Sequence
  Description of Artificial Sequence: Synthetic oligonucleotide
ggggcugcucaugcguggc

SEQ ID NO: 3658 - RNA, 19 nt, Artificial Sequence
  Description of Artificial Sequence: Synthetic oligonucleotide
gggcugcucaugcguggcc

SEQ ID NO: 3659 - RNA, 19 nt, Artificial Sequence
  Description of Artificial Sequence: Synthetic oligonucleotide
ggcugcucaugcguggccu

SEQ ID NO: 3660 - RNA, 19 nt, Artificial Sequence
  Description of Artificial Sequence: Synthetic oligonucleotide
gcugcucaugcguggccug

SEQ ID NO: 3661 - RNA, 19 nt, Artificial Sequence
  Description of Artificial Sequence: Synthetic oligonucleotide
cugcucaugcguggccuga

SEQ ID NO: 3662 - RNA, 19 nt, Artificial Sequence
  Description of Artificial Sequence: Synthetic oligonucleotide
ugcucaugcguggccugaa

SEQ ID NO: 3663 - RNA, 19 nt, Artificial Sequence
  Description of Artificial Sequence: Synthetic oligonucleotide
gcucaugcguggccugaac

SEQ ID NO: 3664 - RNA, 19 nt, Artificial Sequence
  Description of Artificial Sequence: Synthetic oligonucleotide
cucaugcguggccugaacc

SEQ ID NO: 3665 - RNA, 19 nt, Artificial Sequence
  Description of Artificial Sequence: Synthetic oligonucleotide
ucaugcguggccugaacca

SEQ ID NO: 3666 - RNA, 19 nt, Artificial Sequence
  Description of Artificial Sequence: Synthetic oligonucleotide
caugcguggccugaaccac

SEQ ID NO: 3667 - RNA, 19 nt, Artificial Sequence
  Description of Artificial Sequence: Synthetic oligonucleotide
augcguggccugaaccacc

SEQ ID NO: 3668 - RNA, 19 nt, Artificial Sequence
  Description of Artificial Sequence: Synthetic oligonucleotide
ugcguggccugaaccaccc

SEQ ID NO: 3669 - RNA, 19 nt, Artificial Sequence
  Description of Artificial Sequence: Synthetic oligonucleotide
gcguggccugaaccacccg

SEQ ID NO: 3670 - RNA, 19 nt, Artificial Sequence
  Description of Artificial Sequence: Synthetic oligonucleotide
cguggccugaaccacccga

SEQ ID NO: 3671 - RNA, 19 nt, Artificial Sequence
  Description of Artificial Sequence: Synthetic oligonucleotide
guggccugaaccacccgaa

SEQ ID NO: 3672 - RNA, 19 nt, Artificial Sequence
  Description of Artificial Sequence: Synthetic oligonucleotide
uggccugaaccacccgaau

SEQ ID NO: 3673 - RNA, 19 nt, Artificial Sequence
  Description of Artificial Sequence: Synthetic oligonucleotide
ggccugaaccacccgaaug

SEQ ID NO: 3674 - RNA, 19 nt, Artificial Sequence
  Description of Artificial Sequence: Synthetic oligonucleotide
gccugaaccacccgaaugu

SEQ ID NO: 3675 - RNA, 19 nt, Artificial Sequence
  Description of Artificial Sequence: Synthetic oligonucleotide
ccugaaccacccgaaugug

SEQ ID NO: 3676 - RNA, 19 nt, Artificial Sequence
  Description of Artificial Sequence: Synthetic oligonucleotide
cugaaccacccgaaugugc

SEQ ID NO: 3677 - RNA, 19 nt, Artificial Sequence
  Description of Artificial Sequence: Synthetic oligonucleotide
ugaaccacccgaaugugcu

SEQ ID NO: 3678 - RNA, 19 nt, Artificial Sequence
  Description of Artificial Sequence: Synthetic oligonucleotide
gaaccacccgaaugugcug

SEQ ID NO: 3679 - RNA, 19 nt, Artificial Sequence
  Description of Artificial Sequence: Synthetic oligonucleotide
aaccacccgaaugugcugg

SEQ ID NO: 3680 - RNA, 19 nt, Artificial Sequence
  Description of Artificial Sequence: Synthetic oligonucleotide
accacccgaaugugcuggc

SEQ ID NO: 3681 - RNA, 19 nt, Artificial Sequence
  Description of Artificial Sequence: Synthetic oligonucleotide
ccacccgaaugugcuggcu

SEQ ID NO: 3682 - RNA, 19 nt, Artificial Sequence
  Description of Artificial Sequence: Synthetic oligonucleotide
cacccgaaugugcuggcuc

SEQ ID NO: 3683 - RNA, 19 nt, Artificial Sequence
  Description of Artificial Sequence: Synthetic oligonucleotide
acccgaaugugcuggcucu

SEQ ID NO: 3684 - RNA, 19 nt, Artificial Sequence
  Description of Artificial Sequence: Synthetic oligonucleotide
cccgaaugugcuggcucuc

SEQ ID NO: 3685 - RNA, 19 nt, Artificial Sequence
  Description of Artificial Sequence: Synthetic oligonucleotide
ccgaaugugcuggcucuca

SEQ ID NO: 3686 - RNA, 19 nt, Artificial Sequence
  Description of Artificial Sequence: Synthetic oligonucleotide
cgaaugugcuggcucucau

SEQ ID NO: 3687 - RNA, 19 nt, Artificial Sequence
  Description of Artificial Sequence: Synthetic oligonucleotide
gaaugugcuggcucucauu

SEQ ID NO: 3688 - RNA, 19 nt, Artificial Sequence
  Description of Artificial Sequence: Synthetic oligonucleotide
aaugugcuggcucucauug

SEQ ID NO: 3689 - RNA, 19 nt, Artificial Sequence
  Description of Artificial Sequence: Synthetic oligonucleotide
augugcuggcucucauugg

SEQ ID NO: 3690 - RNA, 19 nt, Artificial Sequence
  Description of Artificial Sequence: Synthetic oligonucleotide
ugugcuggcucucauuggu

SEQ ID NO: 3691 - RNA, 19 nt, Artificial Sequence
  Description of Artificial Sequence: Synthetic oligonucleotide
gugcuggcucucauuggua

SEQ ID NO: 3692 - RNA, 19 nt, Artificial Sequence
  Description of Artificial Sequence: Synthetic oligonucleotide
ugcuggcucucauugguau

SEQ ID NO: 3693 - RNA, 19 nt, Artificial Sequence
  Description of Artificial Sequence: Synthetic oligonucleotide
gcuggcucucauugguauc

SEQ ID NO: 3694 - RNA, 19 nt, Artificial Sequence
  Description of Artificial Sequence: Synthetic oligonucleotide
cuggcucucauugguauca

SEQ ID NO: 3695 - RNA, 19 nt, Artificial Sequence
  Description of Artificial Sequence: Synthetic oligonucleotide
uggcucucauugguaucau

SEQ ID NO: 3696 - RNA, 19 nt, Artificial Sequence
  Description of Artificial Sequence: Synthetic oligonucleotide
ggcucucauugguaucaug

SEQ ID NO: 3697 - RNA, 19 nt, Artificial Sequence
  Description of Artificial Sequence: Synthetic oligonucleotide
gcucucauugguaucaugu

SEQ ID NO: 3698 - RNA, 19 nt, Artificial Sequence
  Description of Artificial Sequence: Synthetic oligonucleotide
cucucauugguaucauguu

SEQ ID NO: 3699 - RNA, 19 nt, Artificial Sequence
  Description of Artificial Sequence: Synthetic oligonucleotide
ucucauugguaucauguug

SEQ ID NO: 3700 - RNA, 19 nt, Artificial Sequence
  Description of Artificial Sequence: Synthetic oligonucleotide
cucauugguaucauguugc

SEQ ID NO: 3701 - RNA, 19 nt, Artificial Sequence
  Description of Artificial Sequence: Synthetic oligonucleotide
ucauugguaucauguugcc

SEQ ID NO: 3702 - RNA, 19 nt, Artificial Sequence
  Description of Artificial Sequence: Synthetic oligonucleotide
cauugguaucauguugcca

SEQ ID NO: 3703 - RNA, 19 nt, Artificial Sequence
  Description of Artificial Sequence: Synthetic oligonucleotide
auugguaucauguugccac

SEQ ID NO: 3704 - RNA, 19 nt, Artificial Sequence
  Description of Artificial Sequence: Synthetic oligonucleotide
uugguaucauguugccacc

SEQ ID NO: 3705 - RNA, 19 nt, Artificial Sequence
  Description of Artificial Sequence: Synthetic oligonucleotide
ugguaucauguugccaccu

SEQ ID NO: 3706 - RNA, 19 nt, Artificial Sequence
  Description of Artificial Sequence: Synthetic oligonucleotide
gguaucauguugccaccug

SEQ ID NO: 3707 - RNA, 19 nt, Artificial Sequence
  Description of Artificial Sequence: Synthetic oligonucleotide
guaucauguugccaccuga

SEQ ID NO: 3708 - RNA, 19 nt, Artificial Sequence
  Description of Artificial Sequence: Synthetic oligonucleotide
uaucauguugccaccugag

SEQ ID NO: 3709 - RNA, 19 nt, Artificial Sequence
  Description of Artificial Sequence: Synthetic oligonucleotide
aucauguugccaccugagg

SEQ ID NO: 3710 - RNA, 19 nt, Artificial Sequence
  Description of Artificial Sequence: Synthetic oligonucleotide
ucauguugccaccugaggg

SEQ ID NO: 3711 - RNA, 19 nt, Artificial Sequence
  Description of Artificial Sequence: Synthetic oligonucleotide
cauguugccaccugagggc

SEQ ID NO: 3712 - RNA, 19 nt, Artificial Sequence
  Description of Artificial Sequence: Synthetic oligonucleotide
auguugccaccugagggcc

SEQ ID NO: 3713 - RNA, 19 nt, Artificial Sequence
  Description of Artificial Sequence: Synthetic oligonucleotide
uguugccaccugagggccu

SEQ ID NO: 3714 - RNA, 19 nt, Artificial Sequence
  Description of Artificial Sequence: Synthetic oligonucleotide
guugccaccugagggccug

SEQ ID NO: 3715 - RNA, 19 nt, Artificial Sequence
  Description of Artificial Sequence: Synthetic oligonucleotide
uugccaccugagggccugc

SEQ ID NO: 3716 - RNA, 19 nt, Artificial Sequence
  Description of Artificial Sequence: Synthetic oligonucleotide
ugccaccugagggccugcc

SEQ ID NO: 3717 - RNA, 19 nt, Artificial Sequence
  Description of Artificial Sequence: Synthetic oligonucleotide
gccaccugagggccugccc

SEQ ID NO: 3718 - RNA, 19 nt, Artificial Sequence
  Description of Artificial Sequence: Synthetic oligonucleotide
ccaccugagggccugcccc

SEQ ID NO: 3719 - RNA, 19 nt, Artificial Sequence
  Description of Artificial Sequence: Synthetic oligonucleotide
caccugagggccugcccca

SEQ ID NO: 3720 - RNA, 19 nt, Artificial Sequence
  Description of Artificial Sequence: Synthetic oligonucleotide
accugagggccugccccau

SEQ ID NO: 3721 - RNA, 19 nt, Artificial Sequence
  Description of Artificial Sequence: Synthetic oligonucleotide
ccugagggccugccccaug

SEQ ID NO: 3722 - RNA, 19 nt, Artificial Sequence
  Description of Artificial Sequence: Synthetic oligonucleotide
cugagggccugccccaugu

SEQ ID NO: 3723 - RNA, 19 nt, Artificial Sequence
  Description of Artificial Sequence: Synthetic oligonucleotide
ugagggccugccccaugug

SEQ ID NO: 3724 - RNA, 19 nt, Artificial Sequence
  Description of Artificial Sequence: Synthetic oligonucleotide
gagggccugccccaugugc

SEQ ID NO: 3725 - RNA, 19 nt, Artificial Sequence
  Description of Artificial Sequence: Synthetic oligonucleotide
agggccugccccaugugcu

SEQ ID NO: 3726 - RNA, 19 nt, Artificial Sequence
  Description of Artificial Sequence: Synthetic oligonucleotide
gggccugccccaugugcug

SEQ ID NO: 3727 - RNA, 19 nt, Artificial Sequence
  Description of Artificial Sequence: Synthetic oligonucleotide
ggccugccccaugugcugc

SEQ ID NO: 3728 - RNA, 19 nt, Artificial Sequence
  Description of Artificial Sequence: Synthetic oligonucleotide
gccugccccaugugcugcu

SEQ ID NO: 3729 - RNA, 19 nt, Artificial Sequence
  Description of Artificial Sequence: Synthetic oligonucleotide
ccugccccaugugcugcug

SEQ ID NO: 3730 - RNA, 19 nt, Artificial Sequence
  Description of Artificial Sequence: Synthetic oligonucleotide
cugccccaugugcugcugc

SEQ ID NO: 3731 - RNA, 19 nt, Artificial Sequence
  Description of Artificial Sequence: Synthetic oligonucleotide
ugccccaugugcugcugcc

SEQ ID NO: 3732 - RNA, 19 nt, Artificial Sequence
  Description of Artificial Sequence: Synthetic oligonucleotide
gccccaugugcugcugccc

SEQ ID NO: 3733 - RNA, 19 nt, Artificial Sequence
  Description of Artificial Sequence: Synthetic oligonucleotide
ccccaugugcugcugcccu

SEQ ID NO: 3734 - RNA, 19 nt, Artificial Sequence
  Description of Artificial Sequence: Synthetic oligonucleotide
cccaugugcugcugcccua

SEQ ID NO: 3735 - RNA, 19 nt, Artificial Sequence
  Description of Artificial Sequence: Synthetic oligonucleotide
ccaugugcugcugcccuau

SEQ ID NO: 3736 - RNA, 19 nt, Artificial Sequence
  Description of Artificial Sequence: Synthetic oligonucleotide
caugugcugcugcccuaua

SEQ ID NO: 3737 - RNA, 19 nt, Artificial Sequence
  Description of Artificial Sequence: Synthetic oligonucleotide
augugcugcugcccuauau

SEQ ID NO: 3738 - RNA, 19 nt, Artificial Sequence
  Description of Artificial Sequence: Synthetic oligonucleotide
ugugcugcugcccuauaug

SEQ ID NO: 3739 - RNA, 19 nt, Artificial Sequence
  Description of Artificial Sequence: Synthetic oligonucleotide
gugcugcugcccuauaugu

SEQ ID NO: 3740 - RNA, 19 nt, Artificial Sequence
  Description of Artificial Sequence: Synthetic oligonucleotide
ugcugcugcccuauaugug

SEQ ID NO: 3741 - RNA, 19 nt, Artificial Sequence
  Description of Artificial Sequence: Synthetic oligonucleotide
gcugcugcccuauaugugc

SEQ ID NO: 3742 - RNA, 19 nt, Artificial Sequence
  Description of Artificial Sequence: Synthetic oligonucleotide
cugcugcccuauaugugcc

SEQ ID NO: 3743 - RNA, 19 nt, Artificial Sequence
  Description of Artificial Sequence: Synthetic oligonucleotide
ugcugcccuauaugugcca

SEQ ID NO: 3744 - RNA, 19 nt, Artificial Sequence
  Description of Artificial Sequence: Synthetic oligonucleotide
gcugcccuauaugugccac

SEQ ID NO: 3745 - RNA, 19 nt, Artificial Sequence
  Description of Artificial Sequence: Synthetic oligonucleotide
cugcccuauaugugccacg

SEQ ID NO: 3746 - RNA, 19 nt, Artificial Sequence
  Description of Artificial Sequence: Synthetic oligonucleotide
ugcccuauaugugccacgg

SEQ ID NO: 3747 - RNA, 19 nt, Artificial Sequence
  Description of Artificial Sequence: Synthetic oligonucleotide
gcccuauaugugccacggu

SEQ ID NO: 3748 - RNA, 19 nt, Artificial Sequence
  Description of Artificial Sequence: Synthetic oligonucleotide
cccuauaugugccacggug

SEQ ID NO: 3749 - RNA, 19 nt, Artificial Sequence
  Description of Artificial Sequence: Synthetic oligonucleotide
ccuauaugugccacgguga

SEQ ID NO: 3750 - RNA, 19 nt, Artificial Sequence
  Description of Artificial Sequence: Synthetic oligonucleotide
cuauaugugccacggugac

SEQ ID NO: 3751 - RNA, 19 nt, Artificial Sequence
  Description of Artificial Sequence: Synthetic oligonucleotide
uauaugugccacggugacc

SEQ ID NO: 3752 - RNA, 19 nt, Artificial Sequence
  Description of Artificial Sequence: Synthetic oligonucleotide
auaugugccacggugaccu

SEQ ID NO: 3753 - RNA, 19 nt, Artificial Sequence
  Description of Artificial Sequence: Synthetic oligonucleotide
uaugugccacggugaccug

SEQ ID NO: 3754 - RNA, 19 nt, Artificial Sequence
  Description of Artificial Sequence: Synthetic oligonucleotide
augugccacggugaccugc

SEQ ID NO: 3755 - RNA, 19 nt, Artificial Sequence
  Description of Artificial Sequence: Synthetic oligonucleotide
ugugccacggugaccugcu

SEQ ID NO: 3756 - RNA, 19 nt, Artificial Sequence
  Description of Artificial Sequence: Synthetic oligonucleotide
gugccacggugaccugcuc

SEQ ID NO: 3757 - RNA, 19 nt, Artificial Sequence
  Description of Artificial Sequence: Synthetic oligonucleotide
ugccacggugaccugcucc

SEQ ID NO: 3758 - RNA, 19 nt, Artificial Sequence
  Description of Artificial Sequence: Synthetic oligonucleotide
gccacggugaccugcucca

SEQ ID NO: 3759 - RNA, 19 nt, Artificial Sequence
  Description of Artificial Sequence: Synthetic oligonucleotide
ccacggugaccugcuccag

SEQ ID NO: 3760 - RNA, 19 nt, Artificial Sequence
  Description of Artificial Sequence: Synthetic oligonucleotide
cacggugaccugcuccagu

SEQ ID NO: 3761 - RNA, 19 nt, Artificial Sequence
  Description of Artificial Sequence: Synthetic oligonucleotide
acggugaccugcuccaguu

SEQ ID NO: 3762 - RNA, 19 nt, Artificial Sequence
  Description of Artificial Sequence: Synthetic oligonucleotide
cggugaccugcuccaguuc

SEQ ID NO: 3763 - RNA, 19 nt, Artificial Sequence
  Description of Artificial Sequence: Synthetic oligonucleotide
ggugaccugcuccaguuca

SEQ ID NO: 3764 - RNA, 19 nt, Artificial Sequence
  Description of Artificial Sequence: Synthetic oligonucleotide
gugaccugcuccaguucau

SEQ ID NO: 3765 - RNA, 19 nt, Artificial Sequence
  Description of Artificial Sequence: Synthetic oligonucleotide
ugaccugcuccaguucauc

SEQ ID NO: 3766 - RNA, 19 nt, Artificial Sequence
  Description of Artificial Sequence: Synthetic oligonucleotide
gaccugcuccaguucaucc

SEQ ID NO: 3767 - RNA, 19 nt, Artificial Sequence
  Description of Artificial Sequence: Synthetic oligonucleotide
accugcuccaguucauccg

SEQ ID NO: 3768 - RNA, 19 nt, Artificial Sequence
  Description of Artificial Sequence: Synthetic oligonucleotide
ccugcuccaguucauccgc

SEQ ID NO: 3769 - RNA, 19 nt, Artificial Sequence
  Description of Artificial Sequence: Synthetic oligonucleotide
cugcuccaguucauccgcu

SEQ ID NO: 3770 - RNA, 19 nt, Artificial Sequence
  Description of Artificial Sequence: Synthetic oligonucleotide
ugcuccaguucauccgcuc

SEQ ID NO: 3771 - RNA, 19 nt, Artificial Sequence
  Description of Artificial Sequence: Synthetic oligonucleotide
gcuccaguucauccgcuca

SEQ ID NO: 3772 - RNA, 19 nt, Artificial Sequence
  Description of Artificial Sequence: Synthetic oligonucleotide
cuccaguucauccgcucac

SEQ ID NO: 3773 - RNA, 19 nt, Artificial Sequence
  Description of Artificial Sequence: Synthetic oligonucleotide
uccaguucauccgcucacc

SEQ ID NO: 3774 - RNA, 19 nt, Artificial Sequence
  Description of Artificial Sequence: Synthetic oligonucleotide
ccaguucauccgcucaccu

SEQ ID NO: 3775 - RNA, 19 nt, Artificial Sequence
  Description of Artificial Sequence: Synthetic oligonucleotide
caguucauccgcucaccuc

SEQ ID NO: 3776 - RNA, 19 nt, Artificial Sequence
  Description of Artificial Sequence: Synthetic oligonucleotide
aguucauccgcucaccuca

SEQ ID NO: 3777 - RNA, 19 nt, Artificial Sequence
  Description of Artificial Sequence: Synthetic oligonucleotide
guucauccgcucaccucag

SEQ ID NO: 3778 - RNA, 19 nt, Artificial Sequence
  Description of Artificial Sequence: Synthetic oligonucleotide
uucauccgcucaccucagc

SEQ ID NO: 3779 - RNA, 19 nt, Artificial Sequence
  Description of Artificial Sequence: Synthetic oligonucleotide
ucauccgcucaccucagcg

SEQ ID NO: 3780 - RNA, 19 nt, Artificial Sequence
  Description of Artificial Sequence: Synthetic oligonucleotide
cauccgcucaccucagcgg

SEQ ID NO: 3781 - RNA, 19 nt, Artificial Sequence
  Description of Artificial Sequence: Synthetic oligonucleotide
auccgcucaccucagcgga

SEQ ID NO: 3782 - RNA, 19 nt, Artificial Sequence
  Description of Artificial Sequence: Synthetic oligonucleotide
uccgcucaccucagcggaa

SEQ ID NO: 3783 - RNA, 19 nt, Artificial Sequence
  Description of Artificial Sequence: Synthetic oligonucleotide
ccgcucaccucagcggaac

SEQ ID NO: 3784 - RNA, 19 nt, Artificial Sequence
  Description of Artificial Sequence: Synthetic oligonucleotide
cgcucaccucagcggaacc

SEQ ID NO: 3785 - RNA, 19 nt, Artificial Sequence
  Description of Artificial Sequence: Synthetic oligonucleotide
gcucaccucagcggaaccc

SEQ ID NO: 3786 - RNA, 19 nt, Artificial Sequence
  Description of Artificial Sequence: Synthetic oligonucleotide
cucaccucagcggaacccc

SEQ ID NO: 3787 - RNA, 19 nt, Artificial Sequence
  Description of Artificial Sequence: Synthetic oligonucleotide
ucaccucagcggaacccca

SEQ ID NO: 3788 - RNA, 19 nt, Artificial Sequence
  Description of Artificial Sequence: Synthetic oligonucleotide
caccucagcggaaccccac

SEQ ID NO: 3789 - RNA, 19 nt, Artificial Sequence
  Description of Artificial Sequence: Synthetic oligonucleotide
accucagcggaaccccacc

SEQ ID NO: 3790 - RNA, 19 nt, Artificial Sequence
  Description of Artificial Sequence: Synthetic oligonucleotide
ccucagcggaaccccaccg

SEQ ID NO: 3791 - RNA, 19 nt, Artificial Sequence
  Description of Artificial Sequence: Synthetic oligonucleotide
cucagcggaaccccaccgu

SEQ ID NO: 3792 - RNA, 19 nt, Artificial Sequence
  Description of Artificial Sequence: Synthetic oligonucleotide
ucagcggaaccccaccgug

SEQ ID NO: 3793 - RNA, 19 nt, Artificial Sequence
  Description of Artificial Sequence: Synthetic oligonucleotide
cagcggaaccccaccguga

SEQ ID NO: 3794 - RNA, 19 nt, Artificial Sequence
  Description of Artificial Sequence: Synthetic oligonucleotide
agcggaaccccaccgugaa

SEQ ID NO: 3795 - RNA, 19 nt, Artificial Sequence
  Description of Artificial Sequence: Synthetic oligonucleotide
gcggaaccccaccgugaag

SEQ ID NO: 3796 - RNA, 19 nt, Artificial Sequence
  Description of Artificial Sequence: Synthetic oligonucleotide
cggaaccccaccgugaagg

SEQ ID NO: 3797 - RNA, 19 nt, Artificial Sequence
  Description of Artificial Sequence: Synthetic oligonucleotide
ggaaccccaccgugaagga

SEQ ID NO: 3798 - RNA, 19 nt, Artificial Sequence
  Description of Artificial Sequence: Synthetic oligonucleotide
gaaccccaccgugaaggac

SEQ ID NO: 3799 - RNA, 19 nt, Artificial Sequence
  Description of Artificial Sequence: Synthetic oligonucleotide
aaccccaccgugaaggacc

SEQ ID NO: 3800 - RNA, 19 nt, Artificial Sequence
  Description of Artificial Sequence: Synthetic oligonucleotide
accccaccgugaaggaccu

SEQ ID NO: 3801 - RNA, 19 nt, Artificial Sequence
  Description of Artificial Sequence: Synthetic oligonucleotide
ccccaccgugaaggaccuc

SEQ ID NO: 3802 - RNA, 19 nt, Artificial Sequence
  Description of Artificial Sequence: Synthetic oligonucleotide
cccaccgugaaggaccuca

SEQ ID NO: 3803 - RNA, 19 nt, Artificial Sequence
  Description of Artificial Sequence: Synthetic oligonucleotide
ccaccgugaaggaccucau

SEQ ID NO: 3804 - RNA, 19 nt, Artificial Sequence
  Description of Artificial Sequence: Synthetic oligonucleotide
caccgugaaggaccucauc

SEQ ID NO: 3805 - RNA, 19 nt, Artificial Sequence
  Description of Artificial Sequence: Synthetic oligonucleotide
accgugaaggaccucauca

SEQ ID NO: 3806 - RNA, 19 nt, Artificial Sequence
  Description of Artificial Sequence: Synthetic oligonucleotide
ccgugaaggaccucaucag

SEQ ID NO: 3807 - RNA, 19 nt, Artificial Sequence
  Description of Artificial Sequence: Synthetic oligonucleotide
cgugaaggaccucaucagc

SEQ ID NO: 3808 - RNA, 19 nt, Artificial Sequence
  Description of Artificial Sequence: Synthetic oligonucleotide
gugaaggaccucaucagcu

SEQ ID NO: 3809 - RNA, 19 nt, Artificial Sequence
  Description of Artificial Sequence: Synthetic oligonucleotide
ugaaggaccucaucagcuu

SEQ ID NO: 3810 - RNA, 19 nt, Artificial Sequence
  Description of Artificial Sequence: Synthetic oligonucleotide
gaaggaccucaucagcuuu

SEQ ID NO: 3811 - RNA, 19 nt, Artificial Sequence
  Description of Artificial Sequence: Synthetic oligonucleotide
aaggaccucaucagcuuug

SEQ ID NO: 3812 - RNA, 19 nt, Artificial Sequence
  Description of Artificial Sequence: Synthetic oligonucleotide
aggaccucaucagcuuugg

SEQ ID NO: 3813 - RNA, 19 nt, Artificial Sequence
  Description of Artificial Sequence: Synthetic oligonucleotide
ggaccucaucagcuuuggc

SEQ ID NO: 3814 - RNA, 19 nt, Artificial Sequence
  Description of Artificial Sequence: Synthetic oligonucleotide
gaccucaucagcuuuggcc

SEQ ID NO: 3815 - RNA, 19 nt, Artificial Sequence
  Description of Artificial Sequence: Synthetic oligonucleotide
accucaucagcuuuggccu

SEQ ID NO: 3816 - RNA, 19 nt, Artificial Sequence
  Description of Artificial Sequence: Synthetic oligonucleotide
ccucaucagcuuuggccug

SEQ ID NO: 3817 - RNA, 19 nt, Artificial Sequence
  Description of Artificial Sequence: Synthetic oligonucleotide
cucaucagcuuuggccugc

SEQ ID NO: 3818 - RNA, 19 nt, Artificial Sequence
  Description of Artificial Sequence: Synthetic oligonucleotide
ucaucagcuuuggccugca

SEQ ID NO: 3819 - RNA, 19 nt, Artificial Sequence
  Description of Artificial Sequence: Synthetic oligonucleotide
caucagcuuuggccugcag

SEQ ID NO: 3820 - RNA, 19 nt, Artificial Sequence
  Description of Artificial Sequence: Synthetic oligonucleotide
aucagcuuuggccugcagg

SEQ ID NO: 3821 - RNA, 19 nt, Artificial Sequence
  Description of Artificial Sequence: Synthetic oligonucleotide
ucagcuuuggccugcaggu

SEQ ID NO: 3822 - RNA, 19 nt, Artificial Sequence
  Description of Artificial Sequence: Synthetic oligonucleotide
cagcuuuggccugcaggua

SEQ ID NO: 3823 - RNA, 19 nt, Artificial Sequence
  Description of Artificial Sequence: Synthetic oligonucleotide
agcuuuggccugcagguag

SEQ ID NO: 3824 - RNA, 19 nt, Artificial Sequence
  Description of Artificial Sequence: Synthetic oligonucleotide
gcuuuggccugcagguagc

SEQ ID NO: 3825 - RNA, 19 nt, Artificial Sequence
  Description of Artificial Sequence: Synthetic oligonucleotide
cuuuggccugcagguagcc

SEQ ID NO: 3826 - RNA, 19 nt, Artificial Sequence
  Description of Artificial Sequence: Synthetic oligonucleotide
uuuggccugcagguagccc

SEQ ID NO: 3827 - RNA, 19 nt, Artificial Sequence
  Description of Artificial Sequence: Synthetic oligonucleotide
uuggccugcagguagcccg

SEQ ID NO: 3828 - RNA, 19 nt, Artificial Sequence
  Description of Artificial Sequence: Synthetic oligonucleotide
uggccugcagguagcccgc

SEQ ID NO: 3829 - RNA, 19 nt, Artificial Sequence
  Description of Artificial Sequence: Synthetic oligonucleotide
ggccugcagguagcccgcg

SEQ ID NO: 3830 - RNA, 19 nt, Artificial Sequence
  Description of Artificial Sequence: Synthetic oligonucleotide
gccugcagguagcccgcgg

SEQ ID NO: 3831 - RNA, 19 nt, Artificial Sequence
  Description of Artificial Sequence: Synthetic oligonucleotide
ccugcagguagcccgcggc

SEQ ID NO: 3832 - RNA, 19 nt, Artificial Sequence
  Description of Artificial Sequence: Synthetic oligonucleotide
cugcagguagcccgcggca

SEQ ID NO: 3833 - RNA, 19 nt, Artificial Sequence
  Description of Artificial Sequence: Synthetic oligonucleotide
ugcagguagcccgcggcau

SEQ ID NO: 3834 - RNA, 19 nt, Artificial Sequence
  Description of Artificial Sequence: Synthetic oligonucleotide
gcagguagcccgcggcaug

SEQ ID NO: 3835 - RNA, 19 nt, Artificial Sequence
  Description of Artificial Sequence: Synthetic oligonucleotide
cagguagcccgcggcaugg

SEQ ID NO: 3836 - RNA, 19 nt, Artificial Sequence
  Description of Artificial Sequence: Synthetic oligonucleotide
agguagcccgcggcaugga

SEQ ID NO: 3837 - RNA, 19 nt, Artificial Sequence
  Description of Artificial Sequence: Synthetic oligonucleotide
gguagcccgcggcauggag

SEQ ID NO: 3838 - RNA, 19 nt, Artificial Sequence
  Description of Artificial Sequence: Synthetic oligonucleotide
guagcccgcggcauggagu

SEQ ID NO: 3839 - RNA, 19 nt, Artificial Sequence
  Description of Artificial Sequence: Synthetic oligonucleotide
uagcccgcggcauggagua

SEQ ID NO: 3840 - RNA, 19 nt, Artificial Sequence
  Description of Artificial Sequence: Synthetic oligonucleotide
agcccgcggcauggaguac

SEQ ID NO: 3841 - RNA, 19 nt, Artificial Sequence
  Description of Artificial Sequence: Synthetic oligonucleotide
gcccgcggcauggaguacc

SEQ ID NO: 3842 - RNA, 19 nt, Artificial Sequence
  Description of Artificial Sequence: Synthetic oligonucleotide
cccgcggcauggaguaccu

SEQ ID NO: 3843 - RNA, 19 nt, Artificial Sequence
  Description of Artificial Sequence: Synthetic oligonucleotide
ccgcggcauggaguaccug

SEQ ID NO: 3844 - RNA, 19 nt, Artificial Sequence
  Description of Artificial Sequence: Synthetic oligonucleotide
cgcggcauggaguaccugg

SEQ ID NO: 3845 - RNA, 19 nt, Artificial Sequence
  Description of Artificial Sequence: Synthetic oligonucleotide
gcggcauggaguaccuggc

SEQ ID NO: 3846 - RNA, 19 nt, Artificial Sequence
  Description of Artificial Sequence: Synthetic oligonucleotide
cggcauggaguaccuggca

SEQ ID NO: 3847 - RNA, 19 nt, Artificial Sequence
  Description of Artificial Sequence: Synthetic oligonucleotide
ggcauggaguaccuggcag

SEQ ID NO: 3848 - RNA, 19 nt, Artificial Sequence
  Description of Artificial Sequence: Synthetic oligonucleotide
gcauggaguaccuggcaga

SEQ ID NO: 3849 - RNA, 19 nt, Artificial Sequence
  Description of Artificial Sequence: Synthetic oligonucleotide
cauggaguaccuggcagag

SEQ ID NO: 3850 - RNA, 19 nt, Artificial Sequence
  Description of Artificial Sequence: Synthetic oligonucleotide
auggaguaccuggcagagc

SEQ ID NO: 3851 - RNA, 19 nt, Artificial Sequence
  Description of Artificial Sequence: Synthetic oligonucleotide
uggaguaccuggcagagca

SEQ ID NO: 3852 - RNA, 19 nt, Artificial Sequence
  Description of Artificial Sequence: Synthetic oligonucleotide
ggaguaccuggcagagcag

SEQ ID NO: 3853 - RNA, 19 nt, Artificial Sequence
  Description of Artificial Sequence: Synthetic oligonucleotide
gaguaccuggcagagcaga

SEQ ID NO: 3854 - RNA, 19 nt, Artificial Sequence
  Description of Artificial Sequence: Synthetic oligonucleotide
aguaccuggcagagcagaa

SEQ ID NO: 3855 - RNA, 19 nt, Artificial Sequence
  Description of Artificial Sequence: Synthetic oligonucleotide
guaccuggcagagcagaag

SEQ ID NO: 3856 - RNA, 19 nt, Artificial Sequence
  Description of Artificial Sequence: Synthetic oligonucleotide
uaccuggcagagcagaagu

SEQ ID NO: 3857 - RNA, 19 nt, Artificial Sequence
  Description of Artificial Sequence: Synthetic oligonucleotide
accuggcagagcagaaguu

SEQ ID NO: 3858 - RNA, 19 nt, Artificial Sequence
  Description of Artificial Sequence: Synthetic oligonucleotide
ccuggcagagcagaaguuu

SEQ ID NO: 3859 - RNA, 19 nt, Artificial Sequence
  Description of Artificial Sequence: Synthetic oligonucleotide
cuggcagagcagaaguuug

SEQ ID NO: 3860 - RNA, 19 nt, Artificial Sequence
  Description of Artificial Sequence: Synthetic oligonucleotide
uggcagagcagaaguuugu

SEQ ID NO: 3861 - RNA, 19 nt, Artificial Sequence
  Description of Artificial Sequence: Synthetic oligonucleotide
ggcagagcagaaguuugug

SEQ ID NO: 3862 - RNA, 19 nt, Artificial Sequence
  Description of Artificial Sequence: Synthetic oligonucleotide
gcagagcagaaguuugugc

SEQ ID NO: 3863 - RNA, 19 nt, Artificial Sequence
  Description of Artificial Sequence: Synthetic oligonucleotide
cagagcagaaguuugugca

SEQ ID NO: 3864 - RNA, 19 nt, Artificial Sequence
  Description of Artificial Sequence: Synthetic oligonucleotide
agagcagaaguuugugcac

SEQ ID NO: 3865 - RNA, 19 nt, Artificial Sequence
  Description of Artificial Sequence: Synthetic oligonucleotide
gagcagaaguuugugcaca

SEQ ID NO: 3866 - RNA, 19 nt, Artificial Sequence
  Description of Artificial Sequence: Synthetic oligonucleotide
agcagaaguuugugcacag

SEQ ID NO: 3867 - RNA, 19 nt, Artificial Sequence
  Description of Artificial Sequence: Synthetic oligonucleotide
gcagaaguuugugcacagg

SEQ ID NO: 3868 - RNA, 19 nt, Artificial Sequence
  Description of Artificial Sequence: Synthetic oligonucleotide
cagaaguuugugcacaggg

SEQ ID NO: 3869 - RNA, 19 nt, Artificial Sequence
  Description of Artificial Sequence: Synthetic oligonucleotide
agaaguuugugcacaggga

SEQ ID NO: 3870 - RNA, 19 nt, Artificial Sequence
  Description of Artificial Sequence: Synthetic oligonucleotide
gaaguuugugcacagggac

SEQ ID NO: 3871 - RNA, 19 nt, Artificial Sequence
  Description of Artificial Sequence: Synthetic oligonucleotide
aaguuugugcacagggacc

SEQ ID NO: 3872 - RNA, 19 nt, Artificial Sequence
  Description of Artificial Sequence: Synthetic oligonucleotide
aguuugugcacagggaccu

SEQ ID NO: 3873 - RNA, 19 nt, Artificial Sequence
  Description of Artificial Sequence: Synthetic oligonucleotide
guuugugcacagggaccug

SEQ ID NO: 3874 - RNA, 19 nt, Artificial Sequence
  Description of Artificial Sequence: Synthetic oligonucleotide
uuugugcacagggaccugg

SEQ ID NO: 3875 - RNA, 19 nt, Artificial Sequence
  Description of Artificial Sequence: Synthetic oligonucleotide
uugugcacagggaccuggc

SEQ ID NO: 3876 - RNA, 19 nt, Artificial Sequence
  Description of Artificial Sequence: Synthetic oligonucleotide
ugugcacagggaccuggcu

SEQ ID NO: 3877 - RNA, 19 nt, Artificial Sequence
  Description of Artificial Sequence: Synthetic oligonucleotide
gugcacagggaccuggcug

SEQ ID NO: 3878 - RNA, 19 nt, Artificial Sequence
  Description of Artificial Sequence: Synthetic oligonucleotide
ugcacagggaccuggcugc

SEQ ID NO: 3879 - RNA, 19 nt, Artificial Sequence
  Description of Artificial Sequence: Synthetic oligonucleotide
gcacagggaccuggcugcg

SEQ ID NO: 3880 - RNA, 19 nt, Artificial Sequence
  Description of Artificial Sequence: Synthetic oligonucleotide
cacagggaccuggcugcgc

SEQ ID NO: 3881 - RNA, 19 nt, Artificial Sequence
  Description of Artificial Sequence: Synthetic oligonucleotide
acagggaccuggcugcgcg

SEQ ID NO: 3882 - RNA, 19 nt, Artificial Sequence
  Description of Artificial Sequence: Synthetic oligonucleotide
cagggaccuggcugcgcgg

SEQ ID NO: 3883 - RNA, 19 nt, Artificial Sequence
  Description of Artificial Sequence: Synthetic oligonucleotide
agggaccuggcugcgcgga

SEQ ID NO: 3884 - RNA, 19 nt, Artificial Sequence
  Description of Artificial Sequence: Synthetic oligonucleotide
gggaccuggcugcgcggaa

SEQ ID NO: 3885 - RNA, 19 nt, Artificial Sequence
  Description of Artificial Sequence: Synthetic oligonucleotide
ggaccuggcugcgcggaac

SEQ ID NO: 3886 - RNA, 19 nt, Artificial Sequence
  Description of Artificial Sequence: Synthetic oligonucleotide
gaccuggcugcgcggaacu

SEQ ID NO: 3887 - RNA, 19 nt, Artificial Sequence
  Description of Artificial Sequence: Synthetic oligonucleotide
accuggcugcgcggaacug

SEQ ID NO: 3888 - RNA, 19 nt, Artificial Sequence
  Description of Artificial Sequence: Synthetic oligonucleotide
ccuggcugcgcggaacugc

SEQ ID NO: 3889 - RNA, 19 nt, Artificial Sequence
  Description of Artificial Sequence: Synthetic oligonucleotide
cuggcugcgcggaacugca

SEQ ID NO: 3890 - RNA, 19 nt, Artificial Sequence
  Description of Artificial Sequence: Synthetic oligonucleotide
uggcugcgcggaacugcau

SEQ ID NO: 3891 - RNA, 19 nt, Artificial Sequence
  Description of Artificial Sequence: Synthetic oligonucleotide
ggcugcgcggaacugcaug

SEQ ID NO: 3892 - RNA, 19 nt, Artificial Sequence
  Description of Artificial Sequence: Synthetic oligonucleotide
gcugcgcggaacugcaugc

SEQ ID NO: 3893 - RNA, 19 nt, Artificial Sequence
  Description of Artificial Sequence: Synthetic oligonucleotide
cugcgcggaacugcaugcu

SEQ ID NO: 3894 - RNA, 19 nt, Artificial Sequence
  Description of Artificial Sequence: Synthetic oligonucleotide
ugcgcggaacugcaugcug

SEQ ID NO: 3895 - RNA, 19 nt, Artificial Sequence
  Description of Artificial Sequence: Synthetic oligonucleotide
gcgcggaacugcaugcugg

SEQ ID NO: 3896 - RNA, 19 nt, Artificial Sequence
  Description of Artificial Sequence: Synthetic oligonucleotide
cgcggaacugcaugcugga

SEQ ID NO: 3897 - RNA, 19 nt, Artificial Sequence
  Description of Artificial Sequence: Synthetic oligonucleotide
gcggaacugcaugcuggac

SEQ ID NO: 3898 - RNA, 19 nt, Artificial Sequence
  Description of Artificial Sequence: Synthetic oligonucleotide
cggaacugcaugcuggacg

SEQ ID NO: 3899 - RNA, 19 nt, Artificial Sequence
  Description of Artificial Sequence: Synthetic oligonucleotide
ggaacugcaugcuggacga

SEQ ID NO: 3900 - RNA, 19 nt, Artificial Sequence
  Description of Artificial Sequence: Synthetic oligonucleotide
gaacugcaugcuggacgag

SEQ ID NO: 3901 - RNA, 19 nt, Artificial Sequence
  Description of Artificial Sequence: Synthetic oligonucleotide
aacugcaugcuggacgagu

SEQ ID NO: 3902 - RNA, 19 nt, Artificial Sequence
  Description of Artificial Sequence: Synthetic oligonucleotide
acugcaugcuggacgaguc

SEQ ID NO: 3903 - RNA, 19 nt, Artificial Sequence
  Description of Artificial Sequence: Synthetic oligonucleotide
cugcaugcuggacgaguca

SEQ ID NO: 3904 - RNA, 19 nt, Artificial Sequence
  Description of Artificial Sequence: Synthetic oligonucleotide
ugcaugcuggacgagucau

SEQ ID NO: 3905 - RNA, 19 nt, Artificial Sequence
  Description of Artificial Sequence: Synthetic oligonucleotide
gcaugcuggacgagucauu

SEQ ID NO: 3906 - RNA, 19 nt, Artificial Sequence
  Description of Artificial Sequence: Synthetic oligonucleotide
caugcuggacgagucauuc

SEQ ID NO: 3907 - RNA, 19 nt, Artificial Sequence
  Description of Artificial Sequence: Synthetic oligonucleotide
augcuggacgagucauuca

SEQ ID NO: 3908 - RNA, 19 nt, Artificial Sequence
  Description of Artificial Sequence: Synthetic oligonucleotide
ugcuggacgagucauucac

SEQ ID NO: 3909 - RNA, 19 nt, Artificial Sequence
  Description of Artificial Sequence: Synthetic oligonucleotide
gcuggacgagucauucaca

SEQ ID NO: 3910 - RNA, 19 nt, Artificial Sequence
  Description of Artificial Sequence: Synthetic oligonucleotide
cuggacgagucauucacag

SEQ ID NO: 3911 - RNA, 19 nt, Artificial Sequence
  Description of Artificial Sequence: Synthetic oligonucleotide
uggacgagucauucacagu

SEQ ID NO: 3912 - RNA, 19 nt, Artificial Sequence
  Description of Artificial Sequence: Synthetic oligonucleotide
ggacgagucauucacaguc

SEQ ID NO: 3913 - RNA, 19 nt, Artificial Sequence
  Description of Artificial Sequence: Synthetic oligonucleotide
gacgagucauucacaguca

SEQ ID NO: 3914 - RNA, 19 nt, Artificial Sequence
  Description of Artificial Sequence: Synthetic oligonucleotide
acgagucauucacagucaa

SEQ ID NO: 3915 - RNA, 19 nt, Artificial Sequence
  Description of Artificial Sequence: Synthetic oligonucleotide
cgagucauucacagucaag

SEQ ID NO: 3916 - RNA, 19 nt, Artificial Sequence
  Description of Artificial Sequence: Synthetic oligonucleotide
gagucauucacagucaagg

SEQ ID NO: 3917 - RNA, 19 nt, Artificial Sequence
  Description of Artificial Sequence: Synthetic oligonucleotide
agucauucacagucaaggu

SEQ ID NO: 3918 - RNA, 19 nt, Artificial Sequence
  Description of Artificial Sequence: Synthetic oligonucleotide
gucauucacagucaaggug

SEQ ID NO: 3919 - RNA, 19 nt, Artificial Sequence
  Description of Artificial Sequence: Synthetic oligonucleotide
ucauucacagucaaggugg

SEQ ID NO: 3920 - RNA, 19 nt, Artificial Sequence
  Description of Artificial Sequence: Synthetic oligonucleotide
cauucacagucaagguggc

SEQ ID NO: 3921 - RNA, 19 nt, Artificial Sequence
  Description of Artificial Sequence: Synthetic oligonucleotide
auucacagucaagguggcu

SEQ ID NO: 3922 - RNA, 19 nt, Artificial Sequence
  Description of Artificial Sequence: Synthetic oligonucleotide
uucacagucaagguggcug

SEQ ID NO: 3923 - RNA, 19 nt, Artificial Sequence
  Description of Artificial Sequence: Synthetic oligonucleotide
ucacagucaagguggcuga

SEQ ID NO: 3924 - RNA, 19 nt, Artificial Sequence
  Description of Artificial Sequence: Synthetic oligonucleotide
cacagucaagguggcugac

SEQ ID NO: 3925 - RNA, 19 nt, Artificial Sequence
  Description of Artificial Sequence: Synthetic oligonucleotide
acagucaagguggcugacu

SEQ ID NO: 3926 - RNA, 19 nt, Artificial Sequence
  Description of Artificial Sequence: Synthetic oligonucleotide
cagucaagguggcugacuu

SEQ ID NO: 3927 - RNA, 19 nt, Artificial Sequence
  Description of Artificial Sequence: Synthetic oligonucleotide
agucaagguggcugacuuu

SEQ ID NO: 3928 - RNA, 19 nt, Artificial Sequence
  Description of Artificial Sequence: Synthetic oligonucleotide
gucaagguggcugacuuug

SEQ ID NO: 3929 - RNA, 19 nt, Artificial Sequence
  Description of Artificial Sequence: Synthetic oligonucleotide
ucaagguggcugacuuugg

SEQ ID NO: 3930 - RNA, 19 nt, Artificial Sequence
  Description of Artificial Sequence: Synthetic oligonucleotide
caagguggcugacuuuggu

SEQ ID NO: 3931 - RNA, 19 nt, Artificial Sequence
  Description of Artificial Sequence: Synthetic oligonucleotide
aagguggcugacuuugguu

SEQ ID NO: 3932 - RNA, 19 nt, Artificial Sequence
  Description of Artificial Sequence: Synthetic oligonucleotide
agguggcugacuuugguuu

SEQ ID NO: 3933 - RNA, 19 nt, Artificial Sequence
  Description of Artificial Sequence: Synthetic oligonucleotide
gguggcugacuuugguuug

SEQ ID NO: 3934 - RNA, 19 nt, Artificial Sequence
  Description of Artificial Sequence: Synthetic oligonucleotide
guggcugacuuugguuugg

SEQ ID NO: 3935 - RNA, 19 nt, Artificial Sequence
  Description of Artificial Sequence: Synthetic oligonucleotide
uggcugacuuugguuuggc

SEQ ID NO: 3936 - RNA, 19 nt, Artificial Sequence
  Description of Artificial Sequence: Synthetic oligonucleotide
ggcugacuuugguuuggcc

SEQ ID NO: 3937 - RNA, 19 nt, Artificial Sequence
  Description of Artificial Sequence: Synthetic oligonucleotide
gcugacuuugguuuggccc

SEQ ID NO: 3938 - RNA, 19 nt, Artificial Sequence
  Description of Artificial Sequence: Synthetic oligonucleotide
cugacuuugguuuggcccg

SEQ ID NO: 3939 - RNA, 19 nt, Artificial Sequence
  Description of Artificial Sequence: Synthetic oligonucleotide
ugacuuugguuuggcccgc

SEQ ID NO: 3940 - RNA, 19 nt, Artificial Sequence
  Description of Artificial Sequence: Synthetic oligonucleotide
gacuuugguuuggcccgcg

SEQ ID NO: 3941 - RNA, 19 nt, Artificial Sequence
  Description of Artificial Sequence: Synthetic oligonucleotide
acuuugguuuggcccgcga

SEQ ID NO: 3942 - RNA, 19 nt, Artificial Sequence
  Description of Artificial Sequence: Synthetic oligonucleotide
cuuugguuuggcccgcgac

SEQ ID NO: 3943 - RNA, 19 nt, Artificial Sequence
  Description of Artificial Sequence: Synthetic oligonucleotide
uuugguuuggcccgcgaca

SEQ ID NO: 3944 - RNA, 19 nt, Artificial Sequence
  Description of Artificial Sequence: Synthetic oligonucleotide
uugguuuggcccgcgacau

SEQ ID NO: 3945 - RNA, 19 nt, Artificial Sequence
  Description of Artificial Sequence: Synthetic oligonucleotide
ugguuuggcccgcgacauc

SEQ ID NO: 3946 - RNA, 19 nt, Artificial Sequence
  Description of Artificial Sequence: Synthetic oligonucleotide
gguuuggcccgcgacaucc

SEQ ID NO: 3947 - RNA, 19 nt, Artificial Sequence
  Description of Artificial Sequence: Synthetic oligonucleotide
guuuggcccgcgacauccu

SEQ ID NO: 3948 - RNA, 19 nt, Artificial Sequence
  Description of Artificial Sequence: Synthetic oligonucleotide
uuuggcccgcgacauccug

SEQ ID NO: 3949 - RNA, 19 nt, Artificial Sequence
  Description of Artificial Sequence: Synthetic oligonucleotide
uuggcccgcgacauccugg

SEQ ID NO: 3950 - RNA, 19 nt, Artificial Sequence
  Description of Artificial Sequence: Synthetic oligonucleotide
uggcccgcgacauccugga

SEQ ID NO: 3951 - RNA, 19 nt, Artificial Sequence
  Description of Artificial Sequence: Synthetic oligonucleotide
ggcccgcgacauccuggac

SEQ ID NO: 3952 - RNA, 19 nt, Artificial Sequence
  Description of Artificial Sequence: Synthetic oligonucleotide
gcccgcgacauccuggaca

SEQ ID NO: 3953 - RNA, 19 nt, Artificial Sequence
  Description of Artificial Sequence: Synthetic oligonucleotide
cccgcgacauccuggacag

SEQ ID NO: 3954 - RNA, 19 nt, Artificial Sequence
  Description of Artificial Sequence: Synthetic oligonucleotide
ccgcgacauccuggacagg

SEQ ID NO: 3955 - RNA, 19 nt, Artificial Sequence
  Description of Artificial Sequence: Synthetic oligonucleotide
cgcgacauccuggacaggg

SEQ ID NO: 3956 - RNA, 19 nt, Artificial Sequence
  Description of Artificial Sequence: Synthetic oligonucleotide
gcgacauccuggacaggga

SEQ ID NO: 3957 - RNA, 19 nt, Artificial Sequence
  Description of Artificial Sequence: Synthetic oligonucleotide
cgacauccuggacagggag

SEQ ID NO: 3958 - RNA, 19 nt, Artificial Sequence
  Description of Artificial Sequence: Synthetic oligonucleotide
gacauccuggacagggagu

SEQ ID NO: 3959 - RNA, 19 nt, Artificial Sequence
  Description of Artificial Sequence: Synthetic oligonucleotide
acauccuggacagggagua

SEQ ID NO: 3960 - RNA, 19 nt, Artificial Sequence
  Description of Artificial Sequence: Synthetic oligonucleotide
cauccuggacagggaguac

SEQ ID NO: 3961 - RNA, 19 nt, Artificial Sequence
  Description of Artificial Sequence: Synthetic oligonucleotide
auccuggacagggaguacu

SEQ ID NO: 3962 - RNA, 19 nt, Artificial Sequence
  Description of Artificial Sequence: Synthetic oligonucleotide
uccuggacagggaguacua

SEQ ID NO: 3963 - RNA, 19 nt, Artificial Sequence
  Description of Artificial Sequence: Synthetic oligonucleotide
ccuggacagggaguacuau

SEQ ID NO: 3964 - RNA, 19 nt, Artificial Sequence
  Description of Artificial Sequence: Synthetic oligonucleotide
cuggacagggaguacuaua

SEQ ID NO: 3965 - RNA, 19 nt, Artificial Sequence
  Description of Artificial Sequence: Synthetic oligonucleotide
uggacagggaguacuauag

SEQ ID NO: 3966 - RNA, 19 nt, Artificial Sequence
  Description of Artificial Sequence: Synthetic oligonucleotide
ggacagggaguacuauagu

SEQ ID NO: 3967 - RNA, 19 nt, Artificial Sequence
  Description of Artificial Sequence: Synthetic oligonucleotide
gacagggaguacuauagug

SEQ ID NO: 3968 - RNA, 19 nt, Artificial Sequence
  Description of Artificial Sequence: Synthetic oligonucleotide
acagggaguacuauagugu

SEQ ID NO: 3969 - RNA, 19 nt, Artificial Sequence
  Description of Artificial Sequence: Synthetic oligonucleotide
cagggaguacuauaguguu

SEQ ID NO: 3970 - RNA, 19 nt, Artificial Sequence
  Description of Artificial Sequence: Synthetic oligonucleotide
agggaguacuauaguguuc

SEQ ID NO: 3971 - RNA, 19 nt, Artificial Sequence
  Description of Artificial Sequence: Synthetic oligonucleotide
gggaguacuauaguguuca

SEQ ID NO: 3972 - RNA, 19 nt, Artificial Sequence
  Description of Artificial Sequence: Synthetic oligonucleotide
ggaguacuauaguguucaa

SEQ ID NO: 3973 - RNA, 19 nt, Artificial Sequence
  Description of Artificial Sequence: Synthetic oligonucleotide
gaguacuauaguguucaac

SEQ ID NO: 3974 - RNA, 19 nt, Artificial Sequence
  Description of Artificial Sequence: Synthetic oligonucleotide
aguacuauaguguucaaca

SEQ ID NO: 3975 - RNA, 19 nt, Artificial Sequence
  Description of Artificial Sequence: Synthetic oligonucleotide
guacuauaguguucaacag

SEQ ID NO: 3976 - RNA, 19 nt, Artificial Sequence
  Description of Artificial Sequence: Synthetic oligonucleotide
uacuauaguguucaacagc

SEQ ID NO: 3977 - RNA, 19 nt, Artificial Sequence
  Description of Artificial Sequence: Synthetic oligonucleotide
acuauaguguucaacagca

SEQ ID NO: 3978 - RNA, 19 nt, Artificial Sequence
  Description of Artificial Sequence: Synthetic oligonucleotide
cuauaguguucaacagcau

SEQ ID NO: 3979 - RNA, 19 nt, Artificial Sequence
  Description of Artificial Sequence: Synthetic oligonucleotide
uauaguguucaacagcauc

SEQ ID NO: 3980 - RNA, 19 nt, Artificial Sequence
  Description of Artificial Sequence: Synthetic oligonucleotide
auaguguucaacagcaucg

SEQ ID NO: 3981 - RNA, 19 nt, Artificial Sequence
  Description of Artificial Sequence: Synthetic oligonucleotide
uaguguucaacagcaucgc

SEQ ID NO: 3982 - RNA, 19 nt, Artificial Sequence
  Description of Artificial Sequence: Synthetic oligonucleotide
aguguucaacagcaucgcc

SEQ ID NO: 3983 - RNA, 19 nt, Artificial Sequence
  Description of Artificial Sequence: Synthetic oligonucleotide
guguucaacagcaucgcca

SEQ ID NO: 3984 - RNA, 19 nt, Artificial Sequence
  Description of Artificial Sequence: Synthetic oligonucleotide
uguucaacagcaucgccac

SEQ ID NO: 3985 - RNA, 19 nt, Artificial Sequence
  Description of Artificial Sequence: Synthetic oligonucleotide
guucaacagcaucgccacg

SEQ ID NO: 3986 - RNA, 19 nt, Artificial Sequence
  Description of Artificial Sequence: Synthetic oligonucleotide
uucaacagcaucgccacgc

SEQ ID NO: 3987 - RNA, 19 nt, Artificial Sequence
  Description of Artificial Sequence: Synthetic oligonucleotide
ucaacagcaucgccacgcu

SEQ ID NO: 3988 - RNA, 19 nt, Artificial Sequence
  Description of Artificial Sequence: Synthetic oligonucleotide
caacagcaucgccacgcuc

SEQ ID NO: 3989 - RNA, 19 nt, Artificial Sequence
  Description of Artificial Sequence: Synthetic oligonucleotide
aacagcaucgccacgcucg

SEQ ID NO: 3990 - RNA, 19 nt, Artificial Sequence
  Description of Artificial Sequence: Synthetic oligonucleotide
acagcaucgccacgcucgc

SEQ ID NO: 3991 - RNA, 19 nt, Artificial Sequence
  Description of Artificial Sequence: Synthetic oligonucleotide
cagcaucgccacgcucgcc

SEQ ID NO: 3992 - RNA, 19 nt, Artificial Sequence
  Description of Artificial Sequence: Synthetic oligonucleotide
agcaucgccacgcucgccu

SEQ ID NO: 3993 - RNA, 19 nt, Artificial Sequence
  Description of Artificial Sequence: Synthetic oligonucleotide
gcaucgccacgcucgccua

SEQ ID NO: 3994 - RNA, 19 nt, Artificial Sequence
  Description of Artificial Sequence: Synthetic oligonucleotide
caucgccacgcucgccuac

SEQ ID NO: 3995 - RNA, 19 nt, Artificial Sequence
  Description of Artificial Sequence: Synthetic oligonucleotide
aucgccacgcucgccuacc

SEQ ID NO: 3996 - RNA, 19 nt, Artificial Sequence
  Description of Artificial Sequence: Synthetic oligonucleotide
ucgccacgcucgccuaccu

SEQ ID NO: 3997 - RNA, 19 nt, Artificial Sequence
  Description of Artificial Sequence: Synthetic oligonucleotide
cgccacgcucgccuaccug

SEQ ID NO: 3998 - RNA, 19 nt, Artificial Sequence
  Description of Artificial Sequence: Synthetic oligonucleotide
gccacgcucgccuaccugu

SEQ ID NO: 3999 - RNA, 19 nt, Artificial Sequence
  Description of Artificial Sequence: Synthetic oligonucleotide
ccacgcucgccuaccugug

SEQ ID NO: 4000 - RNA, 19 nt, Artificial Sequence
  Description of Artificial Sequence: Synthetic oligonucleotide
cacgcucgccuaccuguga

SEQ ID NO: 4001 - RNA, 19 nt, Artificial Sequence
  Description of Artificial Sequence: Synthetic oligonucleotide
acgcucgccuaccugugaa

SEQ ID NO: 4002 - RNA, 19 nt, Artificial Sequence
  Description of Artificial Sequence: Synthetic oligonucleotide
cgcucgccuaccugugaag

SEQ ID NO: 4003 - RNA, 19 nt, Artificial Sequence
  Description of Artificial Sequence: Synthetic oligonucleotide
gcucgccuaccugugaagu

SEQ ID NO: 4004 - RNA, 19 nt, Artificial Sequence
  Description of Artificial Sequence: Synthetic oligonucleotide
cucgccuaccugugaagug

SEQ ID NO: 4005 - RNA, 19 nt, Artificial Sequence
  Description of Artificial Sequence: Synthetic oligonucleotide
ucgccuaccugugaagugg

SEQ ID NO: 4006 - RNA, 19 nt, Artificial Sequence
  Description of Artificial Sequence: Synthetic oligonucleotide
cgccuaccugugaagugga

SEQ ID NO: 4007 - RNA, 19 nt, Artificial Sequence
  Description of Artificial Sequence: Synthetic oligonucleotide
gccuaccugugaaguggau

SEQ ID NO: 4008 - RNA, 19 nt, Artificial Sequence
  Description of Artificial Sequence: Synthetic oligonucleotide
ccuaccugugaaguggaug

SEQ ID NO: 4009 - RNA, 19 nt, Artificial Sequence
  Description of Artificial Sequence: Synthetic oligonucleotide
cuaccugugaaguggaugg

SEQ ID NO: 4010 - RNA, 19 nt, Artificial Sequence
  Description of Artificial Sequence: Synthetic oligonucleotide
uaccugugaaguggauggc

SEQ ID NO: 4011 - RNA, 19 nt, Artificial Sequence
  Description of Artificial Sequence: Synthetic oligonucleotide
accugugaaguggauggcg

SEQ ID NO: 4012 - RNA, 19 nt, Artificial Sequence
  Description of Artificial Sequence: Synthetic oligonucleotide
ccugugaaguggauggcgc

SEQ ID NO: 4013 - RNA, 19 nt, Artificial Sequence
  Description of Artificial Sequence: Synthetic oligonucleotide
cugugaaguggauggcgcu

SEQ ID NO: 4014 - RNA, 19 nt, Artificial Sequence
  Description of Artificial Sequence: Synthetic oligonucleotide
ugugaaguggauggcgcug

SEQ ID NO: 4015 - RNA, 19 nt, Artificial Sequence
  Description of Artificial Sequence: Synthetic oligonucleotide
gugaaguggauggcgcugg

SEQ ID NO: 4016 - RNA, 19 nt, Artificial Sequence
  Description of Artificial Sequence: Synthetic oligonucleotide
ugaaguggauggcgcugga

SEQ ID NO: 4017 - RNA, 19 nt, Artificial Sequence
  Description of Artificial Sequence: Synthetic oligonucleotide
gaaguggauggcgcuggag

SEQ ID NO: 4018 - RNA, 19 nt, Artificial Sequence
  Description of Artificial Sequence: Synthetic oligonucleotide
aaguggauggcgcuggaga

SEQ ID NO: 4019 - RNA, 19 nt, Artificial Sequence
  Description of Artificial Sequence: Synthetic oligonucleotide
aguggauggcgcuggagag

SEQ ID NO: 4020 - RNA, 19 nt, Artificial Sequence
  Description of Artificial Sequence: Synthetic oligonucleotide
guggauggcgcuggagagc

SEQ ID NO: 4021 - RNA, 19 nt, Artificial Sequence
  Description of Artificial Sequence: Synthetic oligonucleotide
uggauggcgcuggagagcc

SEQ ID NO: 4022 - RNA, 19 nt, Artificial Sequence
  Description of Artificial Sequence: Synthetic oligonucleotide
ggauggcgcuggagagccu

SEQ ID NO: 4023 - RNA, 19 nt, Artificial Sequence
  Description of Artificial Sequence: Synthetic oligonucleotide
gauggcgcuggagagccug

SEQ ID NO: 4024 - RNA, 19 nt, Artificial Sequence
  Description of Artificial Sequence: Synthetic oligonucleotide
auggcgcuggagagccugc

SEQ ID NO: 4025 - RNA, 19 nt, Artificial Sequence
  Description of Artificial Sequence: Synthetic oligonucleotide
uggcgcuggagagccugca

SEQ ID NO: 4026 - RNA, 19 nt, Artificial Sequence
  Description of Artificial Sequence: Synthetic oligonucleotide
ggcgcuggagagccugcag

SEQ ID NO: 4027 - RNA, 19 nt, Artificial Sequence
  Description of Artificial Sequence: Synthetic oligonucleotide
gcgcuggagagccugcaga

SEQ ID NO: 4028 - RNA, 19 nt, Artificial Sequence
  Description of Artificial Sequence: Synthetic oligonucleotide
cgcuggagagccugcagac

SEQ ID NO: 4029 - RNA, 19 nt, Artificial Sequence
  Description of Artificial Sequence: Synthetic oligonucleotide
gcuggagagccugcagacc

SEQ ID NO: 4030 - RNA, 19 nt, Artificial Sequence
  Description of Artificial Sequence: Synthetic oligonucleotide
cuggagagccugcagaccu

SEQ ID NO: 4031 - RNA, 19 nt, Artificial Sequence
  Description of Artificial Sequence: Synthetic oligonucleotide
uggagagccugcagaccua

SEQ ID NO: 4032 - RNA, 19 nt, Artificial Sequence
  Description of Artificial Sequence: Synthetic oligonucleotide
ggagagccugcagaccuau

SEQ ID NO: 4033 - RNA, 19 nt, Artificial Sequence
  Description of Artificial Sequence: Synthetic oligonucleotide
gagagccugcagaccuaua

SEQ ID NO: 4034 - RNA, 19 nt, Artificial Sequence
  Description of Artificial Sequence: Synthetic oligonucleotide
agagccugcagaccuauag

SEQ ID NO: 4035 - RNA, 19 nt, Artificial Sequence
  Description of Artificial Sequence: Synthetic oligonucleotide
gagccugcagaccuauaga

SEQ ID NO: 4036 - RNA, 19 nt, Artificial Sequence
  Description of Artificial Sequence: Synthetic oligonucleotide
agccugcagaccuauagau

SEQ ID NO: 4037 - RNA, 19 nt, Artificial Sequence
  Description of Artificial Sequence: Synthetic oligonucleotide
gccugcagaccuauagauu

SEQ ID NO: 4038 - RNA, 19 nt, Artificial Sequence
  Description of Artificial Sequence: Synthetic oligonucleotide
ccugcagaccuauagauuu

SEQ ID NO: 4039 - RNA, 19 nt, Artificial Sequence
  Description of Artificial Sequence: Synthetic oligonucleotide
cugcagaccuauagauuua

SEQ ID NO: 4040 - RNA, 19 nt, Artificial Sequence
  Description of Artificial Sequence: Synthetic oligonucleotide
ugcagaccuauagauuuac

SEQ ID NO: 4041 - RNA, 19 nt, Artificial Sequence
  Description of Artificial Sequence: Synthetic oligonucleotide
gcagaccuauagauuuacc

SEQ ID NO: 4042 - RNA, 19 nt, Artificial Sequence
  Description of Artificial Sequence: Synthetic oligonucleotide
cagaccuauagauuuacca

SEQ ID NO: 4043 - RNA, 19 nt, Artificial Sequence
  Description of Artificial Sequence: Synthetic oligonucleotide
agaccuauagauuuaccac

SEQ ID NO: 4044 - RNA, 19 nt, Artificial Sequence
  Description of Artificial Sequence: Synthetic oligonucleotide
gaccuauagauuuaccacc

SEQ ID NO: 4045 - RNA, 19 nt, Artificial Sequence
  Description of Artificial Sequence: Synthetic oligonucleotide
accuauagauuuaccacca

SEQ ID NO: 4046 - RNA, 19 nt, Artificial Sequence
  Description of Artificial Sequence: Synthetic oligonucleotide
ccuauagauuuaccaccaa

SEQ ID NO: 4047 - RNA, 19 nt, Artificial Sequence
  Description of Artificial Sequence: Synthetic oligonucleotide
cuauagauuuaccaccaag

SEQ ID NO: 4048 - RNA, 19 nt, Artificial Sequence
  Description of Artificial Sequence: Synthetic oligonucleotide
uauagauuuaccaccaagu

SEQ ID NO: 4049 - RNA, 19 nt, Artificial Sequence
  Description of Artificial Sequence: Synthetic oligonucleotide
auagauuuaccaccaaguc

SEQ ID NO: 4050 - RNA, 19 nt, Artificial Sequence
  Description of Artificial Sequence: Synthetic oligonucleotide
uagauuuaccaccaagucu

SEQ ID NO: 4051 - RNA, 19 nt, Artificial Sequence
  Description of Artificial Sequence: Synthetic oligonucleotide
agauuuaccaccaagucug

SEQ ID NO: 4052 - RNA, 19 nt, Artificial Sequence
  Description of Artificial Sequence: Synthetic oligonucleotide
gauuuaccaccaagucuga

SEQ ID NO: 4053 - RNA, 19 nt, Artificial Sequence
  Description of Artificial Sequence: Synthetic oligonucleotide
auuuaccaccaagucugau

SEQ ID NO: 4054 - RNA, 19 nt, Artificial Sequence
  Description of Artificial Sequence: Synthetic oligonucleotide
uuuaccaccaagucugaug

SEQ ID NO: 4055 - RNA, 19 nt, Artificial Sequence
  Description of Artificial Sequence: Synthetic oligonucleotide
uuaccaccaagucugaugu

SEQ ID NO: 4056 - RNA, 19 nt, Artificial Sequence
  Description of Artificial Sequence: Synthetic oligonucleotide
uaccaccaagucugaugug

SEQ ID NO: 4057 - RNA, 19 nt, Artificial Sequence
  Description of Artificial Sequence: Synthetic oligonucleotide
accaccaagucugaugugu

SEQ ID NO: 4058 - RNA, 19 nt, Artificial Sequence
  Description of Artificial Sequence: Synthetic oligonucleotide
ccaccaagucugaugugug

SEQ ID NO: 4059 - RNA, 19 nt, Artificial Sequence
  Description of Artificial Sequence: Synthetic oligonucleotide
caccaagucugaugugugg

SEQ ID NO: 4060 - RNA, 19 nt, Artificial Sequence
  Description of Artificial Sequence: Synthetic oligonucleotide
accaagucugauguguggu

SEQ ID NO: 4061 - RNA, 19 nt, Artificial Sequence
  Description of Artificial Sequence: Synthetic oligonucleotide
ccaagucugaugugugguc

SEQ ID NO: 4062 - RNA, 19 nt, Artificial Sequence
  Description of Artificial Sequence: Synthetic oligonucleotide
caagucugaugugugguca

SEQ ID NO: 4063 - RNA, 19 nt, Artificial Sequence
  Description of Artificial Sequence: Synthetic oligonucleotide
aagucugauguguggucau

SEQ ID NO: 4064 - RNA, 19 nt, Artificial Sequence
  Description of Artificial Sequence: Synthetic oligonucleotide
agucugauguguggucauu

SEQ ID NO: 4065 - RNA, 19 nt, Artificial Sequence
  Description of Artificial Sequence: Synthetic oligonucleotide
gucugauguguggucauuu

SEQ ID NO: 4066 - RNA, 19 nt, Artificial Sequence
  Description of Artificial Sequence: Synthetic oligonucleotide
ucugauguguggucauuug

SEQ ID NO: 4067 - RNA, 19 nt, Artificial Sequence
  Description of Artificial Sequence: Synthetic oligonucleotide
cugauguguggucauuugg

SEQ ID NO: 4068 - RNA, 19 nt, Artificial Sequence
  Description of Artificial Sequence: Synthetic oligonucleotide
ugauguguggucauuuggu

SEQ ID NO: 4069 - RNA, 19 nt, Artificial Sequence
  Description of Artificial Sequence: Synthetic oligonucleotide
gauguguggucauuuggug

SEQ ID NO: 4070 - RNA, 19 nt, Artificial Sequence
  Description of Artificial Sequence: Synthetic oligonucleotide
auguguggucauuuggugu

SEQ ID NO: 4071 - RNA, 19 nt, Artificial Sequence
  Description of Artificial Sequence: Synthetic oligonucleotide
uguguggucauuuggugug

SEQ ID NO: 4072 - RNA, 19 nt, Artificial Sequence
  Description of Artificial Sequence: Synthetic oligonucleotide
guguggucauuuggugugc

SEQ ID NO: 4073 - RNA, 19 nt, Artificial Sequence
  Description of Artificial Sequence: Synthetic oligonucleotide
uguggucauuuggugugcu

SEQ ID NO: 4074 - RNA, 19 nt, Artificial Sequence
  Description of Artificial Sequence: Synthetic oligonucleotide
guggucauuuggugugcug

SEQ ID NO: 4075 - RNA, 19 nt, Artificial Sequence
  Description of Artificial Sequence: Synthetic oligonucleotide
uggucauuuggugugcugc

SEQ ID NO: 4076 - RNA, 19 nt, Artificial Sequence
  Description of Artificial Sequence: Synthetic oligonucleotide
ggucauuuggugugcugcu

SEQ ID NO: 4077 - RNA, 19 nt, Artificial Sequence
  Description of Artificial Sequence: Synthetic oligonucleotide
gucauuuggugugcugcug

SEQ ID NO: 4078 - RNA, 19 nt, Artificial Sequence
  Description of Artificial Sequence: Synthetic oligonucleotide
ucauuuggugugcugcugu

SEQ ID NO: 4079 - RNA, 19 nt, Artificial Sequence
  Description of Artificial Sequence: Synthetic oligonucleotide
cauuuggugugcugcugug

SEQ ID NO: 4080 - RNA, 19 nt, Artificial Sequence
  Description of Artificial Sequence: Synthetic oligonucleotide
auuuggugugcugcugugg

SEQ ID NO: 4081 - RNA, 19 nt, Artificial Sequence
  Description of Artificial Sequence: Synthetic oligonucleotide
uuuggugugcugcuguggg

SEQ ID NO: 4082 - RNA, 19 nt, Artificial Sequence
  Description of Artificial Sequence: Synthetic oligonucleotide
uuggugugcugcuguggga

SEQ ID NO: 4083 - RNA, 19 nt, Artificial Sequence
  Description of Artificial Sequence: Synthetic oligonucleotide
uggugugcugcugugggaa

SEQ ID NO: 4084 - RNA, 19 nt, Artificial Sequence
  Description of Artificial Sequence: Synthetic oligonucleotide
ggugugcugcugugggaac

SEQ ID NO: 4085 - RNA, 19 nt, Artificial Sequence
  Description of Artificial Sequence: Synthetic oligonucleotide
gugugcugcugugggaacu

SEQ ID NO: 4086 - RNA, 19 nt, Artificial Sequence
  Description of Artificial Sequence: Synthetic oligonucleotide
ugugcugcugugggaacug

SEQ ID NO: 4087 - RNA, 19 nt, Artificial Sequence
  Description of Artificial Sequence: Synthetic oligonucleotide
gugcugcugugggaacugc

SEQ ID NO: 4088 - RNA, 19 nt, Artificial Sequence
  Description of Artificial Sequence: Synthetic oligonucleotide
ugcugcugugggaacugcu

SEQ ID NO: 4089 - RNA, 19 nt, Artificial Sequence
  Description of Artificial Sequence: Synthetic oligonucleotide
gcugcugugggaacugcug

SEQ ID NO: 4090 - RNA, 19 nt, Artificial Sequence
  Description of Artificial Sequence: Synthetic oligonucleotide
cugcugugggaacugcuga

SEQ ID NO: 4091 - RNA, 19 nt, Artificial Sequence
  Description of Artificial Sequence: Synthetic oligonucleotide
ugcugugggaacugcugac

SEQ ID NO: 4092 - RNA, 19 nt, Artificial Sequence
  Description of Artificial Sequence: Synthetic oligonucleotide
gcugugggaacugcugaca

SEQ ID NO: 4093 - RNA, 19 nt, Artificial Sequence
  Description of Artificial Sequence: Synthetic oligonucleotide
cugugggaacugcugacac

SEQ ID NO: 4094 - RNA, 19 nt, Artificial Sequence
  Description of Artificial Sequence: Synthetic oligonucleotide
ugugggaacugcugacacg

SEQ ID NO: 4095 - RNA, 19 nt, Artificial Sequence
  Description of Artificial Sequence: Synthetic oligonucleotide
gugggaacugcugacacgg

SEQ ID NO: 4096 - RNA, 19 nt, Artificial Sequence
  Description of Artificial Sequence: Synthetic oligonucleotide
ugggaacugcugacacggg

SEQ ID NO: 4097 - RNA, 19 nt, Artificial Sequence
  Description of Artificial Sequence: Synthetic oligonucleotide
gggaacugcugacacgggg

SEQ ID NO: 4098 - RNA, 19 nt, Artificial Sequence
  Description of Artificial Sequence: Synthetic oligonucleotide
ggaacugcugacacggggu

SEQ ID NO: 4099 - RNA, 19 nt, Artificial Sequence
  Description of Artificial Sequence: Synthetic oligonucleotide
gaacugcugacacggggug

SEQ ID NO: 4100 - RNA, 19 nt, Artificial Sequence
  Description of Artificial Sequence: Synthetic oligonucleotide
aacugcugacacggggugc

SEQ ID NO: 4101 - RNA, 19 nt, Artificial Sequence
  Description of Artificial Sequence: Synthetic oligonucleotide
acugcugacacggggugcc

SEQ ID NO: 4102 - RNA, 19 nt, Artificial Sequence
  Description of Artificial Sequence: Synthetic oligonucleotide
cugcugacacggggugccc

SEQ ID NO: 4103 - RNA, 19 nt, Artificial Sequence
  Description of Artificial Sequence: Synthetic oligonucleotide
ugcugacacggggugcccc

SEQ ID NO: 4104 - RNA, 19 nt, Artificial Sequence
  Description of Artificial Sequence: Synthetic oligonucleotide
gcugacacggggugcccca

SEQ ID NO: 4105 - RNA, 19 nt, Artificial Sequence
  Description of Artificial Sequence: Synthetic oligonucleotide
cugacacggggugccccac

SEQ ID NO: 4106 - RNA, 19 nt, Artificial Sequence
  Description of Artificial Sequence: Synthetic oligonucleotide
ugacacggggugccccacc

SEQ ID NO: 4107 - RNA, 19 nt, Artificial Sequence
  Description of Artificial Sequence: Synthetic oligonucleotide
gacacggggugccccacca

SEQ ID NO: 4108 - RNA, 19 nt, Artificial Sequence
  Description of Artificial Sequence: Synthetic oligonucleotide
acacggggugccccaccau

SEQ ID NO: 4109 - RNA, 19 nt, Artificial Sequence
  Description of Artificial Sequence: Synthetic oligonucleotide
cacggggugccccaccaua

SEQ ID NO: 4110 - RNA, 19 nt, Artificial Sequence
  Description of Artificial Sequence: Synthetic oligonucleotide
acggggugccccaccauac

SEQ ID NO: 4111 - RNA, 19 nt, Artificial Sequence
  Description of Artificial Sequence: Synthetic oligonucleotide
cggggugccccaccauacc

SEQ ID NO: 4112 - RNA, 19 nt, Artificial Sequence
  Description of Artificial Sequence: Synthetic oligonucleotide
ggggugccccaccauaccg

SEQ ID NO: 4113 - RNA, 19 nt, Artificial Sequence
  Description of Artificial Sequence: Synthetic oligonucleotide
gggugccccaccauaccgc

SEQ ID NO: 4114 - RNA, 19 nt, Artificial Sequence
  Description of Artificial Sequence: Synthetic oligonucleotide
ggugccccaccauaccgcc

SEQ ID NO: 4115 - RNA, 19 nt, Artificial Sequence
  Description of Artificial Sequence: Synthetic oligonucleotide
gugccccaccauaccgcca

SEQ ID NO: 4116 - RNA, 19 nt, Artificial Sequence
  Description of Artificial Sequence: Synthetic oligonucleotide
ugccccaccauaccgccac

SEQ ID NO: 4117 - RNA, 19 nt, Artificial Sequence
  Description of Artificial Sequence: Synthetic oligonucleotide
gccccaccauaccgccaca

SEQ ID NO: 4118 - RNA, 19 nt, Artificial Sequence
  Description of Artificial Sequence: Synthetic oligonucleotide
ccccaccauaccgccacau

SEQ ID NO: 4119 - RNA, 19 nt, Artificial Sequence
  Description of Artificial Sequence: Synthetic oligonucleotide
cccaccauaccgccacauu

SEQ ID NO: 4120 - RNA, 19 nt, Artificial Sequence
  Description of Artificial Sequence: Synthetic oligonucleotide
ccaccauaccgccacauug

SEQ ID NO: 4121 - RNA, 19 nt, Artificial Sequence
  Description of Artificial Sequence: Synthetic oligonucleotide
caccauaccgccacauuga

SEQ ID NO: 4122 - RNA, 19 nt, Artificial Sequence
  Description of Artificial Sequence: Synthetic oligonucleotide
accauaccgccacauugac

SEQ ID NO: 4123 - RNA, 19 nt, Artificial Sequence
  Description of Artificial Sequence: Synthetic oligonucleotide
ccauaccgccacauugacc

SEQ ID NO: 4124 - RNA, 19 nt, Artificial Sequence
  Description of Artificial Sequence: Synthetic oligonucleotide
cauaccgccacauugaccc

SEQ ID NO: 4125 - RNA, 19 nt, Artificial Sequence
  Description of Artificial Sequence: Synthetic oligonucleotide
auaccgccacauugacccu

SEQ ID NO: 4126 - RNA, 19 nt, Artificial Sequence
  Description of Artificial Sequence: Synthetic oligonucleotide
uaccgccacauugacccuu

SEQ ID NO: 4127 - RNA, 19 nt, Artificial Sequence
  Description of Artificial Sequence: Synthetic oligonucleotide
accgccacauugacccuuu

SEQ ID NO: 4128 - RNA, 19 nt, Artificial Sequence
  Description of Artificial Sequence: Synthetic oligonucleotide
ccgccacauugacccuuuu

SEQ ID NO: 4129 - RNA, 19 nt, Artificial Sequence
  Description of Artificial Sequence: Synthetic oligonucleotide
cgccacauugacccuuuug

SEQ ID NO: 4130 - RNA, 19 nt, Artificial Sequence
  Description of Artificial Sequence: Synthetic oligonucleotide
gccacauugacccuuuuga

SEQ ID NO: 4131 - RNA, 19 nt, Artificial Sequence
  Description of Artificial Sequence: Synthetic oligonucleotide
ccacauugacccuuuugac

SEQ ID NO: 4132 - RNA, 19 nt, Artificial Sequence
  Description of Artificial Sequence: Synthetic oligonucleotide
cacauugacccuuuugacc

SEQ ID NO: 4133 - RNA, 19 nt, Artificial Sequence
  Description of Artificial Sequence: Synthetic oligonucleotide
acauugacccuuuugaccu

SEQ ID NO: 4134 - RNA, 19 nt, Artificial Sequence
  Description of Artificial Sequence: Synthetic oligonucleotide
cauugacccuuuugaccuu

SEQ ID NO: 4135 - RNA, 19 nt, Artificial Sequence
  Description of Artificial Sequence: Synthetic oligonucleotide
auugacccuuuugaccuua

SEQ ID NO: 4136 - RNA, 19 nt, Artificial Sequence
  Description of Artificial Sequence: Synthetic oligonucleotide
uugacccuuuugaccuuac

SEQ ID NO: 4137 - RNA, 19 nt, Artificial Sequence
  Description of Artificial Sequence: Synthetic oligonucleotide
ugacccuuuugaccuuacc

SEQ ID NO: 4138 - RNA, 19 nt, Artificial Sequence
  Description of Artificial Sequence: Synthetic oligonucleotide
gacccuuuugaccuuaccc

SEQ ID NO: 4139 - RNA, 19 nt, Artificial Sequence
  Description of Artificial Sequence: Synthetic oligonucleotide
acccuuuugaccuuaccca

SEQ ID NO: 4140 - RNA, 19 nt, Artificial Sequence
  Description of Artificial Sequence: Synthetic oligonucleotide
cccuuuugaccuuacccac

SEQ ID NO: 4141 - RNA, 19 nt, Artificial Sequence
  Description of Artificial Sequence: Synthetic oligonucleotide
ccuuuugaccuuacccacu

SEQ ID NO: 4142 - RNA, 19 nt, Artificial Sequence
  Description of Artificial Sequence: Synthetic oligonucleotide
cuuuugaccuuacccacuu

SEQ ID NO: 4143 - RNA, 19 nt, Artificial Sequence
  Description of Artificial Sequence: Synthetic oligonucleotide
uuuugaccuuacccacuuc

SEQ ID NO: 4144 - RNA, 19 nt, Artificial Sequence
  Description of Artificial Sequence: Synthetic oligonucleotide
uuugaccuuacccacuucc

SEQ ID NO: 4145 - RNA, 19 nt, Artificial Sequence
  Description of Artificial Sequence: Synthetic oligonucleotide
uugaccuuacccacuuccu

SEQ ID NO: 4146 - RNA, 19 nt, Artificial Sequence
  Description of Artificial Sequence: Synthetic oligonucleotide
ugaccuuacccacuuccug

SEQ ID NO: 4147 - RNA, 19 nt, Artificial Sequence
  Description of Artificial Sequence: Synthetic oligonucleotide
gaccuuacccacuuccugg

SEQ ID NO: 4148 - RNA, 19 nt, Artificial Sequence
  Description of Artificial Sequence: Synthetic oligonucleotide
accuuacccacuuccuggc

SEQ ID NO: 4149 - RNA, 19 nt, Artificial Sequence
  Description of Artificial Sequence: Synthetic oligonucleotide
ccuuacccacuuccuggcc

SEQ ID NO: 4150 - RNA, 19 nt, Artificial Sequence
  Description of Artificial Sequence: Synthetic oligonucleotide
cuuacccacuuccuggccc

SEQ ID NO: 4151 - RNA, 19 nt, Artificial Sequence
  Description of Artificial Sequence: Synthetic oligonucleotide
uuacccacuuccuggccca

SEQ ID NO: 4152 - RNA, 19 nt, Artificial Sequence
  Description of Artificial Sequence: Synthetic oligonucleotide
uacccacuuccuggcccag

SEQ ID NO: 4153 - RNA, 19 nt, Artificial Sequence
  Description of Artificial Sequence: Synthetic oligonucleotide
acccacuuccuggcccagg

SEQ ID NO: 4154 - RNA, 19 nt, Artificial Sequence
  Description of Artificial Sequence: Synthetic oligonucleotide
cccacuuccuggcccaggg

SEQ ID NO: 4155 - RNA, 19 nt, Artificial Sequence
  Description of Artificial Sequence: Synthetic oligonucleotide
ccacuuccuggcccagggu

SEQ ID NO: 4156 - RNA, 19 nt, Artificial Sequence
  Description of Artificial Sequence: Synthetic oligonucleotide
cacuuccuggcccaggguc

SEQ ID NO: 4157 - RNA, 19 nt, Artificial Sequence
  Description of Artificial Sequence: Synthetic oligonucleotide
acuuccuggcccagggucg

SEQ ID NO: 4158 - RNA, 19 nt, Artificial Sequence
  Description of Artificial Sequence: Synthetic oligonucleotide
cuuccuggcccagggucgg

SEQ ID NO: 4159 - RNA, 19 nt, Artificial Sequence
  Description of Artificial Sequence: Synthetic oligonucleotide
uuccuggcccagggucggc

SEQ ID NO: 4160 - RNA, 19 nt, Artificial Sequence
  Description of Artificial Sequence: Synthetic oligonucleotide
uccuggcccagggucggcg

SEQ ID NO: 4161 - RNA, 19 nt, Artificial Sequence
  Description of Artificial Sequence: Synthetic oligonucleotide
ccuggcccagggucggcgc

SEQ ID NO: 4162 - RNA, 19 nt, Artificial Sequence
  Description of Artificial Sequence: Synthetic oligonucleotide
cuggcccagggucggcgcc

SEQ ID NO: 4163 - RNA, 19 nt, Artificial Sequence
  Description of Artificial Sequence: Synthetic oligonucleotide
uggcccagggucggcgccu

SEQ ID NO: 4164 - RNA, 19 nt, Artificial Sequence
  Description of Artificial Sequence: Synthetic oligonucleotide
ggcccagggucggcgccug

SEQ ID NO: 4165 - RNA, 19 nt, Artificial Sequence
  Description of Artificial Sequence: Synthetic oligonucleotide
gcccagggucggcgccugc

SEQ ID NO: 4166 - RNA, 19 nt, Artificial Sequence
  Description of Artificial Sequence: Synthetic oligonucleotide
cccagggucggcgccugcc

SEQ ID NO: 4167 - RNA, 19 nt, Artificial Sequence
  Description of Artificial Sequence: Synthetic oligonucleotide
ccagggucggcgccugccc

SEQ ID NO: 4168 - RNA, 19 nt, Artificial Sequence
  Description of Artificial Sequence: Synthetic oligonucleotide
cagggucggcgccugcccc

SEQ ID NO: 4169 - RNA, 19 nt, Artificial Sequence
  Description of Artificial Sequence: Synthetic oligonucleotide
agggucggcgccugcccca

SEQ ID NO: 4170 - RNA, 19 nt, Artificial Sequence
  Description of Artificial Sequence: Synthetic oligonucleotide
gggucggcgccugccccag

SEQ ID NO: 4171 - RNA, 19 nt, Artificial Sequence
  Description of Artificial Sequence: Synthetic oligonucleotide
ggucggcgccugccccagc

SEQ ID NO: 4172 - RNA, 19 nt, Artificial Sequence
  Description of Artificial Sequence: Synthetic oligonucleotide
gucggcgccugccccagcc

SEQ ID NO: 4173 - RNA, 19 nt, Artificial Sequence
  Description of Artificial Sequence: Synthetic oligonucleotide
ucggcgccugccccagccu

SEQ ID NO: 4174 - RNA, 19 nt, Artificial Sequence
  Description of Artificial Sequence: Synthetic oligonucleotide
cggcgccugccccagccug

SEQ ID NO: 4175 - RNA, 19 nt, Artificial Sequence
  Description of Artificial Sequence: Synthetic oligonucleotide
ggcgccugccccagccuga

SEQ ID NO: 4176 - RNA, 19 nt, Artificial Sequence
  Description of Artificial Sequence: Synthetic oligonucleotide
gcgccugccccagccugag

SEQ ID NO: 4177 - RNA, 19 nt, Artificial Sequence
  Description of Artificial Sequence: Synthetic oligonucleotide
cgccugccccagccugagu

SEQ ID NO: 4178 - RNA, 19 nt, Artificial Sequence
  Description of Artificial Sequence: Synthetic oligonucleotide
gccugccccagccugagua

SEQ ID NO: 4179 - RNA, 19 nt, Artificial Sequence
  Description of Artificial Sequence: Synthetic oligonucleotide
ccugccccagccugaguau

SEQ ID NO: 4180 - RNA, 19 nt, Artificial Sequence
  Description of Artificial Sequence: Synthetic oligonucleotide
cugccccagccugaguauu

SEQ ID NO: 4181 - RNA, 19 nt, Artificial Sequence
  Description of Artificial Sequence: Synthetic oligonucleotide
ugccccagccugaguauug

SEQ ID NO: 4182 - RNA, 19 nt, Artificial Sequence
  Description of Artificial Sequence: Synthetic oligonucleotide
gccccagccugaguauugc

SEQ ID NO: 4183 - RNA, 19 nt, Artificial Sequence
  Description of Artificial Sequence: Synthetic oligonucleotide
ccccagccugaguauugcc

SEQ ID NO: 4184 - RNA, 19 nt, Artificial Sequence
  Description of Artificial Sequence: Synthetic oligonucleotide
cccagccugaguauugccc

SEQ ID NO: 4185 - RNA, 19 nt, Artificial Sequence
  Description of Artificial Sequence: Synthetic oligonucleotide
ccagccugaguauugcccu

SEQ ID NO: 4186 - RNA, 19 nt, Artificial Sequence
  Description of Artificial Sequence: Synthetic oligonucleotide
cagccugaguauugcccug

SEQ ID NO: 4187 - RNA, 19 nt, Artificial Sequence
  Description of Artificial Sequence: Synthetic oligonucleotide
agccugaguauugcccuga

SEQ ID NO: 4188 - RNA, 19 nt, Artificial Sequence
  Description of Artificial Sequence: Synthetic oligonucleotide
gccugaguauugcccugau

SEQ ID NO: 4189 - RNA, 19 nt, Artificial Sequence
  Description of Artificial Sequence: Synthetic oligonucleotide
ccugaguauugcccugauu

SEQ ID NO: 4190 - RNA, 19 nt, Artificial Sequence
  Description of Artificial Sequence: Synthetic oligonucleotide
cugaguauugcccugauuc

SEQ ID NO: 4191 - RNA, 19 nt, Artificial Sequence
  Description of Artificial Sequence: Synthetic oligonucleotide
ugaguauugcccugauucu

SEQ ID NO: 4192 - RNA, 19 nt, Artificial Sequence
  Description of Artificial Sequence: Synthetic oligonucleotide
gaguauugcccugauucuc

SEQ ID NO: 4193 - RNA, 19 nt, Artificial Sequence
  Description of Artificial Sequence: Synthetic oligonucleotide
aguauugcccugauucucu

SEQ ID NO: 4194 - RNA, 19 nt, Artificial Sequence
  Description of Artificial Sequence: Synthetic oligonucleotide
guauugcccugauucucug

SEQ ID NO: 4195 - RNA, 19 nt, Artificial Sequence
  Description of Artificial Sequence: Synthetic oligonucleotide
uauugcccugauucucugu

SEQ ID NO: 4196 - RNA, 19 nt, Artificial Sequence
  Description of Artificial Sequence: Synthetic oligonucleotide
auugcccugauucucugua

SEQ ID NO: 4197 - RNA, 19 nt, Artificial Sequence
  Description of Artificial Sequence: Synthetic oligonucleotide
uugcccugauucucuguac

SEQ ID NO: 4198 - RNA, 19 nt, Artificial Sequence
  Description of Artificial Sequence: Synthetic oligonucleotide
ugcccugauucucuguacc

SEQ ID NO: 4199 - RNA, 19 nt, Artificial Sequence
  Description of Artificial Sequence: Synthetic oligonucleotide
gcccugauucucuguacca

SEQ ID NO: 4200 - RNA, 19 nt, Artificial Sequence
  Description of Artificial Sequence: Synthetic oligonucleotide
cccugauucucuguaccaa

SEQ ID NO: 4201 - RNA, 19 nt, Artificial Sequence
  Description of Artificial Sequence: Synthetic oligonucleotide
ccugauucucuguaccaag

SEQ ID NO: 4202 - RNA, 19 nt, Artificial Sequence
  Description of Artificial Sequence: Synthetic oligonucleotide
cugauucucuguaccaagu

SEQ ID NO: 4203 - RNA, 19 nt, Artificial Sequence
  Description of Artificial Sequence: Synthetic oligonucleotide
ugauucucuguaccaagug

SEQ ID NO: 4204 - RNA, 19 nt, Artificial Sequence
  Description of Artificial Sequence: Synthetic oligonucleotide
gauucucuguaccaaguga

SEQ ID NO: 4205 - RNA, 19 nt, Artificial Sequence
  Description of Artificial Sequence: Synthetic oligonucleotide
auucucuguaccaagugau

SEQ ID NO: 4206 - RNA, 19 nt, Artificial Sequence
  Description of Artificial Sequence: Synthetic oligonucleotide
uucucuguaccaagugaug

SEQ ID NO: 4207 - RNA, 19 nt, Artificial Sequence
  Description of Artificial Sequence: Synthetic oligonucleotide
ucucuguaccaagugaugc

SEQ ID NO: 4208 - RNA, 19 nt, Artificial Sequence
  Description of Artificial Sequence: Synthetic oligonucleotide
cucuguaccaagugaugca

SEQ ID NO: 4209 - RNA, 19 nt, Artificial Sequence
  Description of Artificial Sequence: Synthetic oligonucleotide
ucuguaccaagugaugcag

SEQ ID NO: 4210 - RNA, 19 nt, Artificial Sequence
  Description of Artificial Sequence: Synthetic oligonucleotide
cuguaccaagugaugcagc

SEQ ID NO: 4211 - RNA, 19 nt, Artificial Sequence
  Description of Artificial Sequence: Synthetic oligonucleotide
uguaccaagugaugcagca

SEQ ID NO: 4212 - RNA, 19 nt, Artificial Sequence
  Description of Artificial Sequence: Synthetic oligonucleotide
guaccaagugaugcagcaa

SEQ ID NO: 4213 - RNA, 19 nt, Artificial Sequence
  Description of Artificial Sequence: Synthetic oligonucleotide
uaccaagugaugcagcaau

SEQ ID NO: 4214 - RNA, 19 nt, Artificial Sequence
  Description of Artificial Sequence: Synthetic oligonucleotide
accaagugaugcagcaaug

SEQ ID NO: 4215 - RNA, 19 nt, Artificial Sequence
  Description of Artificial Sequence: Synthetic oligonucleotide
ccaagugaugcagcaaugc

SEQ ID NO: 4216 - RNA, 19 nt, Artificial Sequence
  Description of Artificial Sequence: Synthetic oligonucleotide
caagugaugcagcaaugcu

SEQ ID NO: 4217 - RNA, 19 nt, Artificial Sequence
  Description of Artificial Sequence: Synthetic oligonucleotide
aagugaugcagcaaugcug

SEQ ID NO: 4218 - RNA, 19 nt, Artificial Sequence
  Description of Artificial Sequence: Synthetic oligonucleotide
agugaugcagcaaugcugg

SEQ ID NO: 4219 - RNA, 19 nt, Artificial Sequence
  Description of Artificial Sequence: Synthetic oligonucleotide
gugaugcagcaaugcuggg

SEQ ID NO: 4220 - RNA, 19 nt, Artificial Sequence
  Description of Artificial Sequence: Synthetic oligonucleotide
ugaugcagcaaugcuggga

SEQ ID NO: 4221 - RNA, 19 nt, Artificial Sequence
  Description of Artificial Sequence: Synthetic oligonucleotide
gaugcagcaaugcugggag

SEQ ID NO: 4222 - RNA, 19 nt, Artificial Sequence
  Description of Artificial Sequence: Synthetic oligonucleotide
augcagcaaugcugggagg

SEQ ID NO: 4223 - RNA, 19 nt, Artificial Sequence
  Description of Artificial Sequence: Synthetic oligonucleotide
ugcagcaaugcugggaggc

SEQ ID NO: 4224 - RNA, 19 nt, Artificial Sequence
  Description of Artificial Sequence: Synthetic oligonucleotide
gcagcaaugcugggaggca

SEQ ID NO: 4225 - RNA, 19 nt, Artificial Sequence
  Description of Artificial Sequence: Synthetic oligonucleotide
cagcaaugcugggaggcag

SEQ ID NO: 4226 - RNA, 19 nt, Artificial Sequence
  Description of Artificial Sequence: Synthetic oligonucleotide
agcaaugcugggaggcaga

SEQ ID NO: 4227 - RNA, 19 nt, Artificial Sequence
  Description of Artificial Sequence: Synthetic oligonucleotide
gcaaugcugggaggcagac

SEQ ID NO: 4228 - RNA, 19 nt, Artificial Sequence
  Description of Artificial Sequence: Synthetic oligonucleotide
caaugcugggaggcagacc

SEQ ID NO: 4229 - RNA, 19 nt, Artificial Sequence
  Description of Artificial Sequence: Synthetic oligonucleotide
aaugcugggaggcagaccc

SEQ ID NO: 4230 - RNA, 19 nt, Artificial Sequence
  Description of Artificial Sequence: Synthetic oligonucleotide
augcugggaggcagaccca

SEQ ID NO: 4231 - RNA, 19 nt, Artificial Sequence
  Description of Artificial Sequence: Synthetic oligonucleotide
ugcugggaggcagacccag

SEQ ID NO: 4232 - RNA, 19 nt, Artificial Sequence
  Description of Artificial Sequence: Synthetic oligonucleotide
gcugggaggcagacccagc

SEQ ID NO: 4233 - RNA, 19 nt, Artificial Sequence
  Description of Artificial Sequence: Synthetic oligonucleotide
cugggaggcagacccagca

SEQ ID NO: 4234 - RNA, 19 nt, Artificial Sequence
  Description of Artificial Sequence: Synthetic oligonucleotide
ugggaggcagacccagcag

SEQ ID NO: 4235 - RNA, 19 nt, Artificial Sequence
  Description of Artificial Sequence: Synthetic oligonucleotide
gggaggcagacccagcagu

SEQ ID NO: 4236 - RNA, 19 nt, Artificial Sequence
  Description of Artificial Sequence: Synthetic oligonucleotide
ggaggcagacccagcagug

SEQ ID NO: 4237 - RNA, 19 nt, Artificial Sequence
  Description of Artificial Sequence: Synthetic oligonucleotide
gaggcagacccagcagugc

SEQ ID NO: 4238 - RNA, 19 nt, Artificial Sequence
  Description of Artificial Sequence: Synthetic oligonucleotide
aggcagacccagcagugcg

SEQ ID NO: 4239 - RNA, 19 nt, Artificial Sequence
  Description of Artificial Sequence: Synthetic oligonucleotide
ggcagacccagcagugcga

SEQ ID NO: 4240 - RNA, 19 nt, Artificial Sequence
  Description of Artificial Sequence: Synthetic oligonucleotide
gcagacccagcagugcgac

SEQ ID NO: 4241 - RNA, 19 nt, Artificial Sequence
  Description of Artificial Sequence: Synthetic oligonucleotide
cagacccagcagugcgacc

SEQ ID NO: 4242 - RNA, 19 nt, Artificial Sequence
  Description of Artificial Sequence: Synthetic oligonucleotide
agacccagcagugcgaccc

SEQ ID NO: 4243 - RNA, 19 nt, Artificial Sequence
  Description of Artificial Sequence: Synthetic oligonucleotide
gacccagcagugcgaccca

SEQ ID NO: 4244 - RNA, 19 nt, Artificial Sequence
  Description of Artificial Sequence: Synthetic oligonucleotide
acccagcagugcgacccac

SEQ ID NO: 4245 - RNA, 19 nt, Artificial Sequence
  Description of Artificial Sequence: Synthetic oligonucleotide
cccagcagugcgacccacc

SEQ ID NO: 4246 - RNA, 19 nt, Artificial Sequence
  Description of Artificial Sequence: Synthetic oligonucleotide
ccagcagugcgacccaccu

SEQ ID NO: 4247 - RNA, 19 nt, Artificial Sequence
  Description of Artificial Sequence: Synthetic oligonucleotide
cagcagugcgacccaccuu

SEQ ID NO: 4248 - RNA, 19 nt, Artificial Sequence
  Description of Artificial Sequence: Synthetic oligonucleotide
agcagugcgacccaccuuc

SEQ ID NO: 4249 - RNA, 19 nt, Artificial Sequence
  Description of Artificial Sequence: Synthetic oligonucleotide
gcagugcgacccaccuuca

SEQ ID NO: 4250 - RNA, 19 nt, Artificial Sequence
  Description of Artificial Sequence: Synthetic oligonucleotide
cagugcgacccaccuucag

SEQ ID NO: 4251 - RNA, 19 nt, Artificial Sequence
  Description of Artificial Sequence: Synthetic oligonucleotide
agugcgacccaccuucaga

SEQ ID NO: 4252 - RNA, 19 nt, Artificial Sequence
  Description of Artificial Sequence: Synthetic oligonucleotide
gugcgacccaccuucagag

SEQ ID NO: 4253 - RNA, 19 nt, Artificial Sequence
  Description of Artificial Sequence: Synthetic oligonucleotide
ugcgacccaccuucagagu

SEQ ID NO: 4254 - RNA, 19 nt, Artificial Sequence
  Description of Artificial Sequence: Synthetic oligonucleotide
gcgacccaccuucagagua

SEQ ID NO: 4255 - RNA, 19 nt, Artificial Sequence
  Description of Artificial Sequence: Synthetic oligonucleotide
cgacccaccuucagaguac

SEQ ID NO: 4256 - RNA, 19 nt, Artificial Sequence
  Description of Artificial Sequence: Synthetic oligonucleotide
gacccaccuucagaguacu

SEQ ID NO: 4257 - RNA, 19 nt, Artificial Sequence
  Description of Artificial Sequence: Synthetic oligonucleotide
acccaccuucagaguacua

SEQ ID NO: 4258 - RNA, 19 nt, Artificial Sequence
  Description of Artificial Sequence: Synthetic oligonucleotide
cccaccuucagaguacuag

SEQ ID NO: 4259 - RNA, 19 nt, Artificial Sequence
  Description of Artificial Sequence: Synthetic oligonucleotide
ccaccuucagaguacuagu

SEQ ID NO: 4260 - RNA, 19 nt, Artificial Sequence
  Description of Artificial Sequence: Synthetic oligonucleotide
caccuucagaguacuagug

SEQ ID NO: 4261 - RNA, 19 nt, Artificial Sequence
  Description of Artificial Sequence: Synthetic oligonucleotide
accuucagaguacuagugg

SEQ ID NO: 4262 - RNA, 19 nt, Artificial Sequence
  Description of Artificial Sequence: Synthetic oligonucleotide
ccuucagaguacuaguggg

SEQ ID NO: 4263 - RNA, 19 nt, Artificial Sequence
  Description of Artificial Sequence: Synthetic oligonucleotide
cuucagaguacuagugggg

SEQ ID NO: 4264 - RNA, 19 nt, Artificial Sequence
  Description of Artificial Sequence: Synthetic oligonucleotide
uucagaguacuaguggggg

SEQ ID NO: 4265 - RNA, 19 nt, Artificial Sequence
  Description of Artificial Sequence: Synthetic oligonucleotide
ucagaguacuaguggggga

SEQ ID NO: 4266 - RNA, 19 nt, Artificial Sequence
  Description of Artificial Sequence: Synthetic oligonucleotide
cagaguacuagugggggag

SEQ ID NO: 4267 - RNA, 19 nt, Artificial Sequence
  Description of Artificial Sequence: Synthetic oligonucleotide
agaguacuagugggggagg

SEQ ID NO: 4268 - RNA, 19 nt, Artificial Sequence
  Description of Artificial Sequence: Synthetic oligonucleotide
gaguacuagugggggaggu

SEQ ID NO: 4269 - RNA, 19 nt, Artificial Sequence
  Description of Artificial Sequence: Synthetic oligonucleotide
aguacuagugggggaggug

SEQ ID NO: 4270 - RNA, 19 nt, Artificial Sequence
  Description of Artificial Sequence: Synthetic oligonucleotide
guacuagugggggaggugg

SEQ ID NO: 4271 - RNA, 19 nt, Artificial Sequence
  Description of Artificial Sequence: Synthetic oligonucleotide
uacuagugggggaggugga

SEQ ID NO: 4272 - RNA, 19 nt, Artificial Sequence
  Description of Artificial Sequence: Synthetic oligonucleotide
acuagugggggagguggag

SEQ ID NO: 4273 - RNA, 19 nt, Artificial Sequence
  Description of Artificial Sequence: Synthetic oligonucleotide
cuagugggggagguggagc

SEQ ID NO: 4274 - RNA, 19 nt, Artificial Sequence
  Description of Artificial Sequence: Synthetic oligonucleotide
uagugggggagguggagca

SEQ ID NO: 4275 - RNA, 19 nt, Artificial Sequence
  Description of Artificial Sequence: Synthetic oligonucleotide
agugggggagguggagcag

SEQ ID NO: 4276 - RNA, 19 nt, Artificial Sequence
  Description of Artificial Sequence: Synthetic oligonucleotide
gugggggagguggagcaga

SEQ ID NO: 4277 - RNA, 19 nt, Artificial Sequence
  Description of Artificial Sequence: Synthetic oligonucleotide
ugggggagguggagcagau

SEQ ID NO: 4278 - RNA, 19 nt, Artificial Sequence
  Description of Artificial Sequence: Synthetic oligonucleotide
gggggagguggagcagaua

SEQ ID NO: 4279 - RNA, 19 nt, Artificial Sequence
  Description of Artificial Sequence: Synthetic oligonucleotide
ggggagguggagcagauag

SEQ ID NO: 4280 - RNA, 19 nt, Artificial Sequence
  Description of Artificial Sequence: Synthetic oligonucleotide
gggagguggagcagauagu

SEQ ID NO: 4281 - RNA, 19 nt, Artificial Sequence
  Description of Artificial Sequence: Synthetic oligonucleotide
ggagguggagcagauagug

SEQ ID NO: 4282 - RNA, 19 nt, Artificial Sequence
  Description of Artificial Sequence: Synthetic oligonucleotide
gagguggagcagauagugu

SEQ ID NO: 4283 - RNA, 19 nt, Artificial Sequence
  Description of Artificial Sequence: Synthetic oligonucleotide
agguggagcagauaguguc

SEQ ID NO: 4284 - RNA, 19 nt, Artificial Sequence
  Description of Artificial Sequence: Synthetic oligonucleotide
gguggagcagauagugucu

SEQ ID NO: 4285 - RNA, 19 nt, Artificial Sequence
  Description of Artificial Sequence: Synthetic oligonucleotide
guggagcagauagugucug

SEQ ID NO: 4286 - RNA, 19 nt, Artificial Sequence
  Description of Artificial Sequence: Synthetic oligonucleotide
uggagcagauagugucugc

SEQ ID NO: 4287 - RNA, 19 nt, Artificial Sequence
  Description of Artificial Sequence: Synthetic oligonucleotide
ggagcagauagugucugca

SEQ ID NO: 4288 - RNA, 19 nt, Artificial Sequence
  Description of Artificial Sequence: Synthetic oligonucleotide
gagcagauagugucugcac

SEQ ID NO: 4289 - RNA, 19 nt, Artificial Sequence
  Description of Artificial Sequence: Synthetic oligonucleotide
agcagauagugucugcacu

SEQ ID NO: 4290 - RNA, 19 nt, Artificial Sequence
  Description of Artificial Sequence: Synthetic oligonucleotide
gcagauagugucugcacug

SEQ ID NO: 4291 - RNA, 19 nt, Artificial Sequence
  Description of Artificial Sequence: Synthetic oligonucleotide
cagauagugucugcacugc

SEQ ID NO: 4292 - RNA, 19 nt, Artificial Sequence
  Description of Artificial Sequence: Synthetic oligonucleotide
agauagugucugcacugcu

SEQ ID NO: 4293 - RNA, 19 nt, Artificial Sequence
  Description of Artificial Sequence: Synthetic oligonucleotide
gauagugucugcacugcuu

SEQ ID NO: 4294 - RNA, 19 nt, Artificial Sequence
  Description of Artificial Sequence: Synthetic oligonucleotide
auagugucugcacugcuug

SEQ ID NO: 4295 - RNA, 19 nt, Artificial Sequence
  Description of Artificial Sequence: Synthetic oligonucleotide
uagugucugcacugcuugg

SEQ ID NO: 4296 - RNA, 19 nt, Artificial Sequence
  Description of Artificial Sequence: Synthetic oligonucleotide
agugucugcacugcuuggg

SEQ ID NO: 4297 - RNA, 19 nt, Artificial Sequence
  Description of Artificial Sequence: Synthetic oligonucleotide
gugucugcacugcuugggg

SEQ ID NO: 4298 - RNA, 19 nt, Artificial Sequence
  Description of Artificial Sequence: Synthetic oligonucleotide
ugucugcacugcuugggga

SEQ ID NO: 4299 - RNA, 19 nt, Artificial Sequence
  Description of Artificial Sequence: Synthetic oligonucleotide
gucugcacugcuuggggac

SEQ ID NO: 4300 - RNA, 19 nt, Artificial Sequence
  Description of Artificial Sequence: Synthetic oligonucleotide
ucugcacugcuuggggacc

SEQ ID NO: 4301 - RNA, 19 nt, Artificial Sequence
  Description of Artificial Sequence: Synthetic oligonucleotide
cugcacugcuuggggacca

SEQ ID NO: 4302 - RNA, 19 nt, Artificial Sequence
  Description of Artificial Sequence: Synthetic oligonucleotide
ugcacugcuuggggaccau

SEQ ID NO: 4303 - RNA, 19 nt, Artificial Sequence
  Description of Artificial Sequence: Synthetic oligonucleotide
gcacugcuuggggaccauu

SEQ ID NO: 4304 - RNA, 19 nt, Artificial Sequence
  Description of Artificial Sequence: Synthetic oligonucleotide
cacugcuuggggaccauua

SEQ ID NO: 4305 - RNA, 19 nt, Artificial Sequence
  Description of Artificial Sequence: Synthetic oligonucleotide
acugcuuggggaccauuau

SEQ ID NO: 4306 - RNA, 19 nt, Artificial Sequence
  Description of Artificial Sequence: Synthetic oligonucleotide
cugcuuggggaccauuaug

SEQ ID NO: 4307 - RNA, 19 nt, Artificial Sequence
  Description of Artificial Sequence: Synthetic oligonucleotide
ugcuuggggaccauuaugu

SEQ ID NO: 4308 - RNA, 19 nt, Artificial Sequence
  Description of Artificial Sequence: Synthetic oligonucleotide
gcuuggggaccauuaugug

SEQ ID NO: 4309 - RNA, 19 nt, Artificial Sequence
  Description of Artificial Sequence: Synthetic oligonucleotide
cuuggggaccauuaugugc

SEQ ID NO: 4310 - RNA, 19 nt, Artificial Sequence
  Description of Artificial Sequence: Synthetic oligonucleotide
uuggggaccauuaugugca

SEQ ID NO: 4311 - RNA, 19 nt, Artificial Sequence
  Description of Artificial Sequence: Synthetic oligonucleotide
uggggaccauuaugugcag

SEQ ID NO: 4312 - RNA, 19 nt, Artificial Sequence
  Description of Artificial Sequence: Synthetic oligonucleotide
ggggaccauuaugugcagc

SEQ ID NO: 4313 - RNA, 19 nt, Artificial Sequence
  Description of Artificial Sequence: Synthetic oligonucleotide
gggaccauuaugugcagcu

SEQ ID NO: 4314 - RNA, 19 nt, Artificial Sequence
  Description of Artificial Sequence: Synthetic oligonucleotide
ggaccauuaugugcagcug

SEQ ID NO: 4315 - RNA, 19 nt, Artificial Sequence
  Description of Artificial Sequence: Synthetic oligonucleotide
gaccauuaugugcagcugc

SEQ ID NO: 4316 - RNA, 19 nt, Artificial Sequence
  Description of Artificial Sequence: Synthetic oligonucleotide
accauuaugugcagcugcc

SEQ ID NO: 4317 - RNA, 19 nt, Artificial Sequence
  Description of Artificial Sequence: Synthetic oligonucleotide
ccauuaugugcagcugcca

SEQ ID NO: 4318 - RNA, 19 nt, Artificial Sequence
  Description of Artificial Sequence: Synthetic oligonucleotide
cauuaugugcagcugccag

SEQ ID NO: 4319 - RNA, 19 nt, Artificial Sequence
  Description of Artificial Sequence: Synthetic oligonucleotide
auuaugugcagcugccagc

SEQ ID NO: 4320 - RNA, 19 nt, Artificial Sequence
  Description of Artificial Sequence: Synthetic oligonucleotide
uuaugugcagcugccagca

SEQ ID NO: 4321 - RNA, 19 nt, Artificial Sequence
  Description of Artificial Sequence: Synthetic oligonucleotide
uaugugcagcugccagcaa

SEQ ID NO: 4322 - RNA, 19 nt, Artificial Sequence
  Description of Artificial Sequence: Synthetic oligonucleotide
augugcagcugccagcaac

SEQ ID NO: 4323 - RNA, 19 nt, Artificial Sequence
  Description of Artificial Sequence: Synthetic oligonucleotide
ugugcagcugccagcaacc

SEQ ID NO: 4324 - RNA, 19 nt, Artificial Sequence
  Description of Artificial Sequence: Synthetic oligonucleotide
gugcagcugccagcaaccu

SEQ ID NO: 4325 - RNA, 19 nt, Artificial Sequence
  Description of Artificial Sequence: Synthetic oligonucleotide
ugcagcugccagcaaccua

SEQ ID NO: 4326 - RNA, 19 nt, Artificial Sequence
  Description of Artificial Sequence: Synthetic oligonucleotide
gcagcugccagcaaccuac

SEQ ID NO: 4327 - RNA, 19 nt, Artificial Sequence
  Description of Artificial Sequence: Synthetic oligonucleotide
cagcugccagcaaccuaca

SEQ ID NO: 4328 - RNA, 19 nt, Artificial Sequence
  Description of Artificial Sequence: Synthetic oligonucleotide
agcugccagcaaccuacau

SEQ ID NO: 4329 - RNA, 19 nt, Artificial Sequence
  Description of Artificial Sequence: Synthetic oligonucleotide
gcugccagcaaccuacaug

SEQ ID NO: 4330 - RNA, 19 nt, Artificial Sequence
  Description of Artificial Sequence: Synthetic oligonucleotide
cugccagcaaccuacauga

SEQ ID NO: 4331 - RNA, 19 nt, Artificial Sequence
  Description of Artificial Sequence: Synthetic oligonucleotide
ugccagcaaccuacaugaa

SEQ ID NO: 4332 - RNA, 19 nt, Artificial Sequence
  Description of Artificial Sequence: Synthetic oligonucleotide
gccagcaaccuacaugaac

SEQ ID NO: 4333 - RNA, 19 nt, Artificial Sequence
  Description of Artificial Sequence: Synthetic oligonucleotide
ccagcaaccuacaugaacu

SEQ ID NO: 4334 - RNA, 19 nt, Artificial Sequence
  Description of Artificial Sequence: Synthetic oligonucleotide
cagcaaccuacaugaacuu

SEQ ID NO: 4335 - RNA, 19 nt, Artificial Sequence
  Description of Artificial Sequence: Synthetic oligonucleotide
agcaaccuacaugaacuug

SEQ ID NO: 4336 - RNA, 19 nt, Artificial Sequence
  Description of Artificial Sequence: Synthetic oligonucleotide
gcaaccuacaugaacuugg

SEQ ID NO: 4337 - RNA, 19 nt, Artificial Sequence
  Description of Artificial Sequence: Synthetic oligonucleotide
caaccuacaugaacuuggg

SEQ ID NO: 4338 - RNA, 19 nt, Artificial Sequence
  Description of Artificial Sequence: Synthetic oligonucleotide
aaccuacaugaacuugggc

SEQ ID NO: 4339 - RNA, 19 nt, Artificial Sequence
  Description of Artificial Sequence: Synthetic oligonucleotide
accuacaugaacuugggcc

SEQ ID NO: 4340 - RNA, 19 nt, Artificial Sequence
  Description of Artificial Sequence: Synthetic oligonucleotide
ccuacaugaacuugggccc

SEQ ID NO: 4341 - RNA, 19 nt, Artificial Sequence
  Description of Artificial Sequence: Synthetic oligonucleotide
cuacaugaacuugggcccc

SEQ ID NO: 4342 - RNA, 19 nt, Artificial Sequence
  Description of Artificial Sequence: Synthetic oligonucleotide
uacaugaacuugggcccca

SEQ ID NO: 4343 - RNA, 19 nt, Artificial Sequence
  Description of Artificial Sequence: Synthetic oligonucleotide
acaugaacuugggccccag

SEQ ID NO: 4344 - RNA, 19 nt, Artificial Sequence
  Description of Artificial Sequence: Synthetic oligonucleotide
caugaacuugggccccagc

SEQ ID NO: 4345 - RNA, 19 nt, Artificial Sequence
  Description of Artificial Sequence: Synthetic oligonucleotide
augaacuugggccccagca

SEQ ID NO: 4346 - RNA, 19 nt, Artificial Sequence
  Description of Artificial Sequence: Synthetic oligonucleotide
ugaacuugggccccagcac

SEQ ID NO: 4347 - RNA, 19 nt, Artificial Sequence
  Description of Artificial Sequence: Synthetic oligonucleotide
gaacuugggccccagcacc

SEQ ID NO: 4348 - RNA, 19 nt, Artificial Sequence
  Description of Artificial Sequence: Synthetic oligonucleotide
aacuugggccccagcaccu

SEQ ID NO: 4349 - RNA, 19 nt, Artificial Sequence
  Description of Artificial Sequence: Synthetic oligonucleotide
acuugggccccagcaccuc

SEQ ID NO: 4350 - RNA, 19 nt, Artificial Sequence
  Description of Artificial Sequence: Synthetic oligonucleotide
cuugggccccagcaccucg

SEQ ID NO: 4351 - RNA, 19 nt, Artificial Sequence
  Description of Artificial Sequence: Synthetic oligonucleotide
uugggccccagcaccucgc

SEQ ID NO: 4352 - RNA, 19 nt, Artificial Sequence
  Description of Artificial Sequence: Synthetic oligonucleotide
ugggccccagcaccucgca

SEQ ID NO: 4353 - RNA, 19 nt, Artificial Sequence
  Description of Artificial Sequence: Synthetic oligonucleotide
gggccccagcaccucgcau

SEQ ID NO: 4354 - RNA, 19 nt, Artificial Sequence
  Description of Artificial Sequence: Synthetic oligonucleotide
ggccccagcaccucgcaug

SEQ ID NO: 4355 - RNA, 19 nt, Artificial Sequence
  Description of Artificial Sequence: Synthetic oligonucleotide
gccccagcaccucgcauga

SEQ ID NO: 4356 - RNA, 19 nt, Artificial Sequence
  Description of Artificial Sequence: Synthetic oligonucleotide
ccccagcaccucgcaugag

SEQ ID NO: 4357 - RNA, 19 nt, Artificial Sequence
  Description of Artificial Sequence: Synthetic oligonucleotide
cccagcaccucgcaugaga

SEQ ID NO: 4358 - RNA, 19 nt, Artificial Sequence
  Description of Artificial Sequence: Synthetic oligonucleotide
ccagcaccucgcaugagau

SEQ ID NO: 4359 - RNA, 19 nt, Artificial Sequence
  Description of Artificial Sequence: Synthetic oligonucleotide
cagcaccucgcaugagaug

SEQ ID NO: 4360 - RNA, 19 nt, Artificial Sequence
  Description of Artificial Sequence: Synthetic oligonucleotide
agcaccucgcaugagauga

SEQ ID NO: 4361 - RNA, 19 nt, Artificial Sequence
  Description of Artificial Sequence: Synthetic oligonucleotide
gcaccucgcaugagaugaa

SEQ ID NO: 4362 - RNA, 19 nt, Artificial Sequence
  Description of Artificial Sequence: Synthetic oligonucleotide
caccucgcaugagaugaau

SEQ ID NO: 4363 - RNA, 19 nt, Artificial Sequence
  Description of Artificial Sequence: Synthetic oligonucleotide
accucgcaugagaugaaug

SEQ ID NO: 4364 - RNA, 19 nt, Artificial Sequence
  Description of Artificial Sequence: Synthetic oligonucleotide
ccucgcaugagaugaaugu

SEQ ID NO: 4365 - RNA, 19 nt, Artificial Sequence
  Description of Artificial Sequence: Synthetic oligonucleotide
cucgcaugagaugaaugug

SEQ ID NO: 4366 - RNA, 19 nt, Artificial Sequence
  Description of Artificial Sequence: Synthetic oligonucleotide
ucgcaugagaugaaugugc

SEQ ID NO: 4367 - RNA, 19 nt, Artificial Sequence
  Description of Artificial Sequence: Synthetic oligonucleotide
cgcaugagaugaaugugcg

SEQ ID NO: 4368 - RNA, 19 nt, Artificial Sequence
  Description of Artificial Sequence: Synthetic oligonucleotide
gcaugagaugaaugugcgu

SEQ ID NO: 4369 - RNA, 19 nt, Artificial Sequence
  Description of Artificial Sequence: Synthetic oligonucleotide
caugagaugaaugugcguc

SEQ ID NO: 4370 - RNA, 19 nt, Artificial Sequence
  Description of Artificial Sequence: Synthetic oligonucleotide
augagaugaaugugcgucc

SEQ ID NO: 4371 - RNA, 19 nt, Artificial Sequence
  Description of Artificial Sequence: Synthetic oligonucleotide
ugagaugaaugugcgucca

SEQ ID NO: 4372 - RNA, 19 nt, Artificial Sequence
  Description of Artificial Sequence: Synthetic oligonucleotide
gagaugaaugugcguccag

SEQ ID NO: 4373 - RNA, 19 nt, Artificial Sequence
  Description of Artificial Sequence: Synthetic oligonucleotide
agaugaaugugcguccaga

SEQ ID NO: 4374 - RNA, 19 nt, Artificial Sequence
  Description of Artificial Sequence: Synthetic oligonucleotide
gaugaaugugcguccagaa

SEQ ID NO: 4375 - RNA, 19 nt, Artificial Sequence
  Description of Artificial Sequence: Synthetic oligonucleotide
augaaugugcguccagaac

SEQ ID NO: 4376 - RNA, 19 nt, Artificial Sequence
  Description of Artificial Sequence: Synthetic oligonucleotide
ugaaugugcguccagaaca

SEQ ID NO: 4377 - RNA, 19 nt, Artificial Sequence
  Description of Artificial Sequence: Synthetic oligonucleotide
gaaugugcguccagaacag

SEQ ID NO: 4378 - RNA, 19 nt, Artificial Sequence
  Description of Artificial Sequence: Synthetic oligonucleotide
aaugugcguccagaacagc

SEQ ID NO: 4379 - RNA, 19 nt, Artificial Sequence
  Description of Artificial Sequence: Synthetic oligonucleotide
augugcguccagaacagcc

SEQ ID NO: 4380 - RNA, 19 nt, Artificial Sequence
  Description of Artificial Sequence: Synthetic oligonucleotide
ugugcguccagaacagccg

SEQ ID NO: 4381 - RNA, 19 nt, Artificial Sequence
  Description of Artificial Sequence: Synthetic oligonucleotide
gugcguccagaacagccgc

SEQ ID NO: 4382 - RNA, 19 nt, Artificial Sequence
  Description of Artificial Sequence: Synthetic oligonucleotide
ugcguccagaacagccgca

SEQ ID NO: 4383 - RNA, 19 nt, Artificial Sequence
  Description of Artificial Sequence: Synthetic oligonucleotide
gcguccagaacagccgcag

SEQ ID NO: 4384 - RNA, 19 nt, Artificial Sequence
  Description of Artificial Sequence: Synthetic oligonucleotide
cguccagaacagccgcagu

SEQ ID NO: 4385 - RNA, 19 nt, Artificial Sequence
  Description of Artificial Sequence: Synthetic oligonucleotide
guccagaacagccgcaguu

SEQ ID NO: 4386 - RNA, 19 nt, Artificial Sequence
  Description of Artificial Sequence: Synthetic oligonucleotide
uccagaacagccgcaguuc

SEQ ID NO: 4387 - RNA, 19 nt, Artificial Sequence
  Description of Artificial Sequence: Synthetic oligonucleotide
ccagaacagccgcaguucu

SEQ ID NO: 4388 - RNA, 19 nt, Artificial Sequence
  Description of Artificial Sequence: Synthetic oligonucleotide
cagaacagccgcaguucuc

SEQ ID NO: 4389 - RNA, 19 nt, Artificial Sequence
  Description of Artificial Sequence: Synthetic oligonucleotide
agaacagccgcaguucuca

SEQ ID NO: 4390 - RNA, 19 nt, Artificial Sequence
  Description of Artificial Sequence: Synthetic oligonucleotide
gaacagccgcaguucucac

SEQ ID NO: 4391 - RNA, 19 nt, Artificial Sequence
  Description of Artificial Sequence: Synthetic oligonucleotide
aacagccgcaguucucacc

SEQ ID NO: 4392 - RNA, 19 nt, Artificial Sequence
  Description of Artificial Sequence: Synthetic oligonucleotide
acagccgcaguucucaccc

SEQ ID NO: 4393 - RNA, 19 nt, Artificial Sequence
  Description of Artificial Sequence: Synthetic oligonucleotide
cagccgcaguucucaccca

SEQ ID NO: 4394 - RNA, 19 nt, Artificial Sequence
  Description of Artificial Sequence: Synthetic oligonucleotide
agccgcaguucucacccau

SEQ ID NO: 4395 - RNA, 19 nt, Artificial Sequence
  Description of Artificial Sequence: Synthetic oligonucleotide
gccgcaguucucacccaug

SEQ ID NO: 4396 - RNA, 19 nt, Artificial Sequence
  Description of Artificial Sequence: Synthetic oligonucleotide
ccgcaguucucacccaugc

SEQ ID NO: 4397 - RNA, 19 nt, Artificial Sequence
  Description of Artificial Sequence: Synthetic oligonucleotide
cgcaguucucacccaugcc

SEQ ID NO: 4398 - RNA, 19 nt, Artificial Sequence
  Description of Artificial Sequence: Synthetic oligonucleotide
gcaguucucacccaugcca

SEQ ID NO: 4399 - RNA, 19 nt, Artificial Sequence
  Description of Artificial Sequence: Synthetic oligonucleotide
caguucucacccaugccag

SEQ ID NO: 4400 - RNA, 19 nt, Artificial Sequence
  Description of Artificial Sequence: Synthetic oligonucleotide
aguucucacccaugccagg

SEQ ID NO: 4401 - RNA, 19 nt, Artificial Sequence
  Description of Artificial Sequence: Synthetic oligonucleotide
guucucacccaugccaggg

SEQ ID NO: 4402 - RNA, 19 nt, Artificial Sequence
  Description of Artificial Sequence: Synthetic oligonucleotide
uucucacccaugccaggga

SEQ ID NO: 4403 - RNA, 19 nt, Artificial Sequence
  Description of Artificial Sequence: Synthetic oligonucleotide
ucucacccaugccagggaa

SEQ ID NO: 4404 - RNA, 19 nt, Artificial Sequence
  Description of Artificial Sequence: Synthetic oligonucleotide
cucacccaugccagggaau

SEQ ID NO: 4405 - RNA, 19 nt, Artificial Sequence
  Description of Artificial Sequence: Synthetic oligonucleotide
ucacccaugccagggaaug

SEQ ID NO: 4406 - RNA, 19 nt, Artificial Sequence
  Description of Artificial Sequence: Synthetic oligonucleotide
cacccaugccagggaaugu

SEQ ID NO: 4407 - RNA, 19 nt, Artificial Sequence
  Description of Artificial Sequence: Synthetic oligonucleotide
acccaugccagggaaugua

SEQ ID NO: 4408 - RNA, 19 nt, Artificial Sequence
  Description of Artificial Sequence: Synthetic oligonucleotide
cccaugccagggaauguac

SEQ ID NO: 4409 - RNA, 19 nt, Artificial Sequence
  Description of Artificial Sequence: Synthetic oligonucleotide
ccaugccagggaauguacg

SEQ ID NO: 4410 - RNA, 19 nt, Artificial Sequence
  Description of Artificial Sequence: Synthetic oligonucleotide
caugccagggaauguacgc

SEQ ID NO: 4411 - RNA, 19 nt, Artificial Sequence
  Description of Artificial Sequence: Synthetic oligonucleotide
augccagggaauguacgcc

SEQ ID NO: 4412 - RNA, 19 nt, Artificial Sequence
  Description of Artificial Sequence: Synthetic oligonucleotide
ugccagggaauguacgccg

SEQ ID NO: 4413 - RNA, 19 nt, Artificial Sequence
  Description of Artificial Sequence: Synthetic oligonucleotide
gccagggaauguacgccgg

SEQ ID NO: 4414 - RNA, 19 nt, Artificial Sequence
  Description of Artificial Sequence: Synthetic oligonucleotide
ccagggaauguacgccggc

SEQ ID NO: 4415 - RNA, 19 nt, Artificial Sequence
  Description of Artificial Sequence: Synthetic oligonucleotide
cagggaauguacgccggcc

SEQ ID NO: 4416 - RNA, 19 nt, Artificial Sequence
  Description of Artificial Sequence: Synthetic oligonucleotide
agggaauguacgccggccc

SEQ ID NO: 4417 - RNA, 19 nt, Artificial Sequence
  Description of Artificial Sequence: Synthetic oligonucleotide
gggaauguacgccggcccc

SEQ ID NO: 4418 - RNA, 19 nt, Artificial Sequence
  Description of Artificial Sequence: Synthetic oligonucleotide
ggaauguacgccggccccg

SEQ ID NO: 4419 - RNA, 19 nt, Artificial Sequence
  Description of Artificial Sequence: Synthetic oligonucleotide
gaauguacgccggccccgg

SEQ ID NO: 4420 - RNA, 19 nt, Artificial Sequence
  Description of Artificial Sequence: Synthetic oligonucleotide
aauguacgccggccccggc

SEQ ID NO: 4421 - RNA, 19 nt, Artificial Sequence
  Description of Artificial Sequence: Synthetic oligonucleotide
auguacgccggccccggcc

SEQ ID NO: 4422 - RNA, 19 nt, Artificial Sequence
  Description of Artificial Sequence: Synthetic oligonucleotide
uguacgccggccccggcca

SEQ ID NO: 4423 - RNA, 19 nt, Artificial Sequence
  Description of Artificial Sequence: Synthetic oligonucleotide
guacgccggccccggccac

SEQ ID NO: 4424 - RNA, 19 nt, Artificial Sequence
  Description of Artificial Sequence: Synthetic oligonucleotide
uacgccggccccggccacu

SEQ ID NO: 4425 - RNA, 19 nt, Artificial Sequence
  Description of Artificial Sequence: Synthetic oligonucleotide
acgccggccccggccacuc

SEQ ID NO: 4426 - RNA, 19 nt, Artificial Sequence
  Description of Artificial Sequence: Synthetic oligonucleotide
cgccggccccggccacucu

SEQ ID NO: 4427 - RNA, 19 nt, Artificial Sequence
  Description of Artificial Sequence: Synthetic oligonucleotide
gccggccccggccacucuc

SEQ ID NO: 4428 - RNA, 19 nt, Artificial Sequence
  Description of Artificial Sequence: Synthetic oligonucleotide
ccggccccggccacucuca

SEQ ID NO: 4429 - RNA, 19 nt, Artificial Sequence
  Description of Artificial Sequence: Synthetic oligonucleotide
cggccccggccacucucag

SEQ ID NO: 4430 - RNA, 19 nt, Artificial Sequence
  Description of Artificial Sequence: Synthetic oligonucleotide
ggccccggccacucucaga

SEQ ID NO: 4431 - RNA, 19 nt, Artificial Sequence
  Description of Artificial Sequence: Synthetic oligonucleotide
gccccggccacucucagag

SEQ ID NO: 4432 - RNA, 19 nt, Artificial Sequence
  Description of Artificial Sequence: Synthetic oligonucleotide
ccccggccacucucagagc

SEQ ID NO: 4433 - RNA, 19 nt, Artificial Sequence
  Description of Artificial Sequence: Synthetic oligonucleotide
cccggccacucucagagcc

SEQ ID NO: 4434 - RNA, 19 nt, Artificial Sequence
  Description of Artificial Sequence: Synthetic oligonucleotide
ccggccacucucagagccu

SEQ ID NO: 4435 - RNA, 19 nt, Artificial Sequence
  Description of Artificial Sequence: Synthetic oligonucleotide
cggccacucucagagccuc

SEQ ID NO: 4436 - RNA, 19 nt, Artificial Sequence
  Description of Artificial Sequence: Synthetic oligonucleotide
ggccacucucagagccucc

SEQ ID NO: 4437 - RNA, 19 nt, Artificial Sequence
  Description of Artificial Sequence: Synthetic oligonucleotide
gccacucucagagccuccu

SEQ ID NO: 4438 - RNA, 19 nt, Artificial Sequence
  Description of Artificial Sequence: Synthetic oligonucleotide
ccacucucagagccuccuc

SEQ ID NO: 4439 - RNA, 19 nt, Artificial Sequence
  Description of Artificial Sequence: Synthetic oligonucleotide
cacucucagagccuccucg

SEQ ID NO: 4440 - RNA, 19 nt, Artificial Sequence
  Description of Artificial Sequence: Synthetic oligonucleotide
acucucagagccuccucgg

SEQ ID NO: 4441 - RNA, 19 nt, Artificial Sequence
  Description of Artificial Sequence: Synthetic oligonucleotide
cucucagagccuccucggc

SEQ ID NO: 4442 - RNA, 19 nt, Artificial Sequence
  Description of Artificial Sequence: Synthetic oligonucleotide
ucucagagccuccucggcc

SEQ ID NO: 4443 - RNA, 19 nt, Artificial Sequence
  Description of Artificial Sequence: Synthetic oligonucleotide
cucagagccuccucggccc

SEQ ID NO: 4444 - RNA, 19 nt, Artificial Sequence
  Description of Artificial Sequence: Synthetic oligonucleotide
ucagagccuccucggccca

SEQ ID NO: 4445 - RNA, 19 nt, Artificial Sequence
  Description of Artificial Sequence: Synthetic oligonucleotide
cagagccuccucggcccac

SEQ ID NO: 4446 - RNA, 19 nt, Artificial Sequence
  Description of Artificial Sequence: Synthetic oligonucleotide
agagccuccucggcccacu

SEQ ID NO: 4447 - RNA, 19 nt, Artificial Sequence
  Description of Artificial Sequence: Synthetic oligonucleotide
gagccuccucggcccacuu

SEQ ID NO: 4448 - RNA, 19 nt, Artificial Sequence
  Description of Artificial Sequence: Synthetic oligonucleotide
agccuccucggcccacuug

SEQ ID NO: 4449 - RNA, 19 nt, Artificial Sequence
  Description of Artificial Sequence: Synthetic oligonucleotide
gccuccucggcccacuuga

SEQ ID NO: 4450 - RNA, 19 nt, Artificial Sequence
  Description of Artificial Sequence: Synthetic oligonucleotide
ccuccucggcccacuugac

SEQ ID NO: 4451 - RNA, 19 nt, Artificial Sequence
  Description of Artificial Sequence: Synthetic oligonucleotide
cuccucggcccacuugacu

SEQ ID NO: 4452 - RNA, 19 nt, Artificial Sequence
  Description of Artificial Sequence: Synthetic oligonucleotide
uccucggcccacuugacuu

SEQ ID NO: 4453 - RNA, 19 nt, Artificial Sequence
  Description of Artificial Sequence: Synthetic oligonucleotide
ccucggcccacuugacuua

SEQ ID NO: 4454 - RNA, 19 nt, Artificial Sequence
  Description of Artificial Sequence: Synthetic oligonucleotide
cucggcccacuugacuuag

SEQ ID NO: 4455 - RNA, 19 nt, Artificial Sequence
  Description of Artificial Sequence: Synthetic oligonucleotide
ucggcccacuugacuuagu

SEQ ID NO: 4456 - RNA, 19 nt, Artificial Sequence
  Description of Artificial Sequence: Synthetic oligonucleotide
cggcccacuugacuuaguu

SEQ ID NO: 4457 - RNA, 19 nt, Artificial Sequence
  Description of Artificial Sequence: Synthetic oligonucleotide
ggcccacuugacuuaguuc

SEQ ID NO: 4458 - RNA, 19 nt, Artificial Sequence
  Description of Artificial Sequence: Synthetic oligonucleotide
gcccacuugacuuaguucu

SEQ ID NO: 4459 - RNA, 19 nt, Artificial Sequence
  Description of Artificial Sequence: Synthetic oligonucleotide
cccacuugacuuaguucuu

SEQ ID NO: 4460 - RNA, 19 nt, Artificial Sequence
  Description of Artificial Sequence: Synthetic oligonucleotide
ccacuugacuuaguucuug

SEQ ID NO: 4461 - RNA, 19 nt, Artificial Sequence
  Description of Artificial Sequence: Synthetic oligonucleotide
cacuugacuuaguucuugg

SEQ ID NO: 4462 - RNA, 19 nt, Artificial Sequence
  Description of Artificial Sequence: Synthetic oligonucleotide
acuugacuuaguucuuggg

SEQ ID NO: 4463 - RNA, 19 nt, Artificial Sequence
  Description of Artificial Sequence: Synthetic oligonucleotide
cuugacuuaguucuugggc

SEQ ID NO: 4464 - RNA, 19 nt, Artificial Sequence
  Description of Artificial Sequence: Synthetic oligonucleotide
uugacuuaguucuugggcu

SEQ ID NO: 4465 - RNA, 19 nt, Artificial Sequence
  Description of Artificial Sequence: Synthetic oligonucleotide
ugacuuaguucuugggcug

SEQ ID NO: 4466 - RNA, 19 nt, Artificial Sequence
  Description of Artificial Sequence: Synthetic oligonucleotide
gacuuaguucuugggcugg

SEQ ID NO: 4467 - RNA, 19 nt, Artificial Sequence
  Description of Artificial Sequence: Synthetic oligonucleotide
acuuaguucuugggcugga

SEQ ID NO: 4468 - RNA, 19 nt, Artificial Sequence
  Description of Artificial Sequence: Synthetic oligonucleotide
cuuaguucuugggcuggac

SEQ ID NO: 4469 - RNA, 19 nt, Artificial Sequence
  Description of Artificial Sequence: Synthetic oligonucleotide
uuaguucuugggcuggacc

SEQ ID NO: 4470 - RNA, 19 nt, Artificial Sequence
  Description of Artificial Sequence: Synthetic oligonucleotide
uaguucuugggcuggaccu

SEQ ID NO: 4471 - RNA, 19 nt, Artificial Sequence
  Description of Artificial Sequence: Synthetic oligonucleotide
aguucuugggcuggaccug

SEQ ID NO: 4472 - RNA, 19 nt, Artificial Sequence
  Description of Artificial Sequence: Synthetic oligonucleotide
guucuugggcuggaccugc

SEQ ID NO: 4473 - RNA, 19 nt, Artificial Sequence
  Description of Artificial Sequence: Synthetic oligonucleotide
uucuugggcuggaccugcu

SEQ ID NO: 4474 - RNA, 19 nt, Artificial Sequence
  Description of Artificial Sequence: Synthetic oligonucleotide
ucuugggcuggaccugcuu

SEQ ID NO: 4475 - RNA, 19 nt, Artificial Sequence
  Description of Artificial Sequence: Synthetic oligonucleotide
cuugggcuggaccugcuua

SEQ ID NO: 4476 - RNA, 19 nt, Artificial Sequence
  Description of Artificial Sequence: Synthetic oligonucleotide
uugggcuggaccugcuuag

SEQ ID NO: 4477 - RNA, 19 nt, Artificial Sequence
  Description of Artificial Sequence: Synthetic oligonucleotide
ugggcuggaccugcuuagc

SEQ ID NO: 4478 - RNA, 19 nt, Artificial Sequence
  Description of Artificial Sequence: Synthetic oligonucleotide
gggcuggaccugcuuagcu

SEQ ID NO: 4479 - RNA, 19 nt, Artificial Sequence
  Description of Artificial Sequence: Synthetic oligonucleotide
ggcuggaccugcuuagcug

SEQ ID NO: 4480 - RNA, 19 nt, Artificial Sequence
  Description of Artificial Sequence: Synthetic oligonucleotide
gcuggaccugcuuagcugc

SEQ ID NO: 4481 - RNA, 19 nt, Artificial Sequence
  Description of Artificial Sequence: Synthetic oligonucleotide
cuggaccugcuuagcugcc

SEQ ID NO: 4482 - RNA, 19 nt, Artificial Sequence
  Description of Artificial Sequence: Synthetic oligonucleotide
uggaccugcuuagcugccu

SEQ ID NO: 4483 - RNA, 19 nt, Artificial Sequence
  Description of Artificial Sequence: Synthetic oligonucleotide
ggaccugcuuagcugccuu

SEQ ID NO: 4484 - RNA, 19 nt, Artificial Sequence
  Description of Artificial Sequence: Synthetic oligonucleotide
gaccugcuuagcugccuug

SEQ ID NO: 4485 - RNA, 19 nt, Artificial Sequence
  Description of Artificial Sequence: Synthetic oligonucleotide
accugcuuagcugccuuga

SEQ ID NO: 4486 - RNA, 19 nt, Artificial Sequence
  Description of Artificial Sequence: Synthetic oligonucleotide
ccugcuuagcugccuugag

SEQ ID NO: 4487 - RNA, 19 nt, Artificial Sequence
  Description of Artificial Sequence: Synthetic oligonucleotide
cugcuuagcugccuugagc

SEQ ID NO: 4488 - RNA, 19 nt, Artificial Sequence
  Description of Artificial Sequence: Synthetic oligonucleotide
ugcuuagcugccuugagcu

SEQ ID NO: 4489 - RNA, 19 nt, Artificial Sequence
  Description of Artificial Sequence: Synthetic oligonucleotide
gcuuagcugccuugagcua

SEQ ID NO: 4490 - RNA, 19 nt, Artificial Sequence
  Description of Artificial Sequence: Synthetic oligonucleotide
cuuagcugccuugagcuaa

SEQ ID NO: 4491 - RNA, 19 nt, Artificial Sequence
  Description of Artificial Sequence: Synthetic oligonucleotide
uuagcugccuugagcuaac

SEQ ID NO: 4492 - RNA, 19 nt, Artificial Sequence
  Description of Artificial Sequence: Synthetic oligonucleotide
uagcugccuugagcuaacc

SEQ ID NO: 4493 - RNA, 19 nt, Artificial Sequence
  Description of Artificial Sequence: Synthetic oligonucleotide
agcugccuugagcuaaccc

SEQ ID NO: 4494 - RNA, 19 nt, Artificial Sequence
  Description of Artificial Sequence: Synthetic oligonucleotide
gcugccuugagcuaacccc

SEQ ID NO: 4495 - RNA, 19 nt, Artificial Sequence
  Description of Artificial Sequence: Synthetic oligonucleotide
cugccuugagcuaacccca

SEQ ID NO: 4496 - RNA, 19 nt, Artificial Sequence
  Description of Artificial Sequence: Synthetic oligonucleotide
ugccuugagcuaaccccaa

SEQ ID NO: 4497 - RNA, 19 nt, Artificial Sequence
  Description of Artificial Sequence: Synthetic oligonucleotide
gccuugagcuaaccccaag

SEQ ID NO: 4498 - RNA, 19 nt, Artificial Sequence
  Description of Artificial Sequence: Synthetic oligonucleotide
ccuugagcuaaccccaagc

SEQ ID NO: 4499 - RNA, 19 nt, Artificial Sequence
  Description of Artificial Sequence: Synthetic oligonucleotide
cuugagcuaaccccaagcu

SEQ ID NO: 4500 - RNA, 19 nt, Artificial Sequence
  Description of Artificial Sequence: Synthetic oligonucleotide
uugagcuaaccccaagcug

SEQ ID NO: 4501 - RNA, 19 nt, Artificial Sequence
  Description of Artificial Sequence: Synthetic oligonucleotide
ugagcuaaccccaagcugc

SEQ ID NO: 4502 - RNA, 19 nt, Artificial Sequence
  Description of Artificial Sequence: Synthetic oligonucleotide
gagcuaaccccaagcugcc

SEQ ID NO: 4503 - RNA, 19 nt, Artificial Sequence
  Description of Artificial Sequence: Synthetic oligonucleotide
agcuaaccccaagcugccu

SEQ ID NO: 4504 - RNA, 19 nt, Artificial Sequence
  Description of Artificial Sequence: Synthetic oligonucleotide
gcuaaccccaagcugccuc

SEQ ID NO: 4505 - RNA, 19 nt, Artificial Sequence
  Description of Artificial Sequence: Synthetic oligonucleotide
cuaaccccaagcugccucu

SEQ ID NO: 4506 - RNA, 19 nt, Artificial Sequence
  Description of Artificial Sequence: Synthetic oligonucleotide
uaaccccaagcugccucug

SEQ ID NO: 4507 - RNA, 19 nt, Artificial Sequence
  Description of Artificial Sequence: Synthetic oligonucleotide
aaccccaagcugccucugg

SEQ ID NO: 4508 - RNA, 19 nt, Artificial Sequence
  Description of Artificial Sequence: Synthetic oligonucleotide
accccaagcugccucuggg

SEQ ID NO: 4509 - RNA, 19 nt, Artificial Sequence
  Description of Artificial Sequence: Synthetic oligonucleotide
ccccaagcugccucugggc

SEQ ID NO: 4510 - RNA, 19 nt, Artificial Sequence
  Description of Artificial Sequence: Synthetic oligonucleotide
cccaagcugccucugggcc

SEQ ID NO: 4511 - RNA, 19 nt, Artificial Sequence
  Description of Artificial Sequence: Synthetic oligonucleotide
ccaagcugccucugggcca

SEQ ID NO: 4512 - RNA, 19 nt, Artificial Sequence
  Description of Artificial Sequence: Synthetic oligonucleotide
caagcugccucugggccau

SEQ ID NO: 4513 - RNA, 19 nt, Artificial Sequence
  Description of Artificial Sequence: Synthetic oligonucleotide
aagcugccucugggccaug

SEQ ID NO: 4514 - RNA, 19 nt, Artificial Sequence
  Description of Artificial Sequence: Synthetic oligonucleotide
agcugccucugggccaugc

SEQ ID NO: 4515 - RNA, 19 nt, Artificial Sequence
  Description of Artificial Sequence: Synthetic oligonucleotide
gcugccucugggccaugcc

SEQ ID NO: 4516 - RNA, 19 nt, Artificial Sequence
  Description of Artificial Sequence: Synthetic oligonucleotide
cugccucugggccaugcca

SEQ ID NO: 4517 - RNA, 19 nt, Artificial Sequence
  Description of Artificial Sequence: Synthetic oligonucleotide
ugccucugggccaugccag

SEQ ID NO: 4518 - RNA, 19 nt, Artificial Sequence
  Description of Artificial Sequence: Synthetic oligonucleotide
gccucugggccaugccagg

SEQ ID NO: 4519 - RNA, 19 nt, Artificial Sequence
  Description of Artificial Sequence: Synthetic oligonucleotide
ccucugggccaugccaggc

SEQ ID NO: 4520 - RNA, 19 nt, Artificial Sequence
  Description of Artificial Sequence: Synthetic oligonucleotide
cucugggccaugccaggcc

SEQ ID NO: 4521 - RNA, 19 nt, Artificial Sequence
  Description of Artificial Sequence: Synthetic oligonucleotide
ucugggccaugccaggcca

SEQ ID NO: 4522 - RNA, 19 nt, Artificial Sequence
  Description of Artificial Sequence: Synthetic oligonucleotide
cugggccaugccaggccag

SEQ ID NO: 4523 - RNA, 19 nt, Artificial Sequence
  Description of Artificial Sequence: Synthetic oligonucleotide
ugggccaugccaggccaga

SEQ ID NO: 4524 - RNA, 19 nt, Artificial Sequence
  Description of Artificial Sequence: Synthetic oligonucleotide
gggccaugccaggccagag

SEQ ID NO: 4525 - RNA, 19 nt, Artificial Sequence
  Description of Artificial Sequence: Synthetic oligonucleotide
ggccaugccaggccagagg

SEQ ID NO: 4526 - RNA, 19 nt, Artificial Sequence
  Description of Artificial Sequence: Synthetic oligonucleotide
gccaugccaggccagaggg

SEQ ID NO: 4527 - RNA, 19 nt, Artificial Sequence
  Description of Artificial Sequence: Synthetic oligonucleotide
ccaugccaggccagagggc

SEQ ID NO: 4528 - RNA, 19 nt, Artificial Sequence
  Description of Artificial Sequence: Synthetic oligonucleotide
caugccaggccagagggca

SEQ ID NO: 4529 - RNA, 19 nt, Artificial Sequence
  Description of Artificial Sequence: Synthetic oligonucleotide
augccaggccagagggcag

SEQ ID NO: 4530 - RNA, 19 nt, Artificial Sequence
  Description of Artificial Sequence: Synthetic oligonucleotide
ugccaggccagagggcagu

SEQ ID NO: 4531 - RNA, 19 nt, Artificial Sequence
  Description of Artificial Sequence: Synthetic oligonucleotide
gccaggccagagggcagug

SEQ ID NO: 4532 - RNA, 19 nt, Artificial Sequence
  Description of Artificial Sequence: Synthetic oligonucleotide
ccaggccagagggcagugg

SEQ ID NO: 4533 - RNA, 19 nt, Artificial Sequence
  Description of Artificial Sequence: Synthetic oligonucleotide
caggccagagggcaguggc

SEQ ID NO: 4534 - RNA, 19 nt, Artificial Sequence
  Description of Artificial Sequence: Synthetic oligonucleotide
aggccagagggcaguggcc

SEQ ID NO: 4535 - RNA, 19 nt, Artificial Sequence
  Description of Artificial Sequence: Synthetic oligonucleotide
ggccagagggcaguggccc

SEQ ID NO: 4536 - RNA, 19 nt, Artificial Sequence
  Description of Artificial Sequence: Synthetic oligonucleotide
gccagagggcaguggcccu

SEQ ID NO: 4537 - RNA, 19 nt, Artificial Sequence
  Description of Artificial Sequence: Synthetic oligonucleotide
ccagagggcaguggcccuc

SEQ ID NO: 4538 - RNA, 19 nt, Artificial Sequence
  Description of Artificial Sequence: Synthetic oligonucleotide
cagagggcaguggcccucc

SEQ ID NO: 4539 - RNA, 19 nt, Artificial Sequence
  Description of Artificial Sequence: Synthetic oligonucleotide
agagggcaguggcccucca

SEQ ID NO: 4540 - RNA, 19 nt, Artificial Sequence
  Description of Artificial Sequence: Synthetic oligonucleotide
gagggcaguggcccuccac

SEQ ID NO: 4541 - RNA, 19 nt, Artificial Sequence
  Description of Artificial Sequence: Synthetic oligonucleotide
agggcaguggcccuccacc

SEQ ID NO: 4542 - RNA, 19 nt, Artificial Sequence
  Description of Artificial Sequence: Synthetic oligonucleotide
gggcaguggcccuccaccu

SEQ ID NO: 4543 - RNA, 19 nt, Artificial Sequence
  Description of Artificial Sequence: Synthetic oligonucleotide
ggcaguggcccuccaccuu

SEQ ID NO: 4544 - RNA, 19 nt, Artificial Sequence
  Description of Artificial Sequence: Synthetic oligonucleotide
gcaguggcccuccaccuug

SEQ ID NO: 4545 - RNA, 19 nt, Artificial Sequence
  Description of Artificial Sequence: Synthetic oligonucleotide
caguggcccuccaccuugu

SEQ ID NO: 4546 - RNA, 19 nt, Artificial Sequence
  Description of Artificial Sequence: Synthetic oligonucleotide
aguggcccuccaccuuguu

SEQ ID NO: 4547 - RNA, 19 nt, Artificial Sequence
  Description of Artificial Sequence: Synthetic oligonucleotide
guggcccuccaccuuguuc

SEQ ID NO: 4548 - RNA, 19 nt, Artificial Sequence
  Description of Artificial Sequence: Synthetic oligonucleotide
uggcccuccaccuuguucc

SEQ ID NO: 4549 - RNA, 19 nt, Artificial Sequence
  Description of Artificial Sequence: Synthetic oligonucleotide
ggcccuccaccuuguuccu

SEQ ID NO: 4550 - RNA, 19 nt, Artificial Sequence
  Description of Artificial Sequence: Synthetic oligonucleotide
gcccuccaccuuguuccug

SEQ ID NO: 4551 - RNA, 19 nt, Artificial Sequence
  Description of Artificial Sequence: Synthetic oligonucleotide
cccuccaccuuguuccugc

SEQ ID NO: 4552 - RNA, 19 nt, Artificial Sequence
  Description of Artificial Sequence: Synthetic oligonucleotide
ccuccaccuuguuccugcc

SEQ ID NO: 4553 - RNA, 19 nt, Artificial Sequence
  Description of Artificial Sequence: Synthetic oligonucleotide
cuccaccuuguuccugccc

SEQ ID NO: 4554 - RNA, 19 nt, Artificial Sequence
  Description of Artificial Sequence: Synthetic oligonucleotide
uccaccuuguuccugcccu

SEQ ID NO: 4555 - RNA, 19 nt, Artificial Sequence
  Description of Artificial Sequence: Synthetic oligonucleotide
ccaccuuguuccugcccuu

SEQ ID NO: 4556 - RNA, 19 nt, Artificial Sequence
  Description of Artificial Sequence: Synthetic oligonucleotide
caccuuguuccugcccuuu

SEQ ID NO: 4557 - RNA, 19 nt, Artificial Sequence
  Description of Artificial Sequence: Synthetic oligonucleotide
accuuguuccugcccuuua

SEQ ID NO: 4558 - RNA, 19 nt, Artificial Sequence
  Description of Artificial Sequence: Synthetic oligonucleotide
ccuuguuccugcccuuuaa

SEQ ID NO: 4559 - RNA, 19 nt, Artificial Sequence
  Description of Artificial Sequence: Synthetic oligonucleotide
cuuguuccugcccuuuaac

SEQ ID NO: 4560 - RNA, 19 nt, Artificial Sequence
  Description of Artificial Sequence: Synthetic oligonucleotide
uuguuccugcccuuuaacu

SEQ ID NO: 4561 - RNA, 19 nt, Artificial Sequence
  Description of Artificial Sequence: Synthetic oligonucleotide
uguuccugcccuuuaacuu

SEQ ID NO: 4562 - RNA, 19 nt, Artificial Sequence
  Description of Artificial Sequence: Synthetic oligonucleotide
guuccugcccuuuaacuuu

SEQ ID NO: 4563 - RNA, 19 nt, Artificial Sequence
  Description of Artificial Sequence: Synthetic oligonucleotide
uuccugcccuuuaacuuuc

SEQ ID NO: 4564 - RNA, 19 nt, Artificial Sequence
  Description of Artificial Sequence: Synthetic oligonucleotide
uccugcccuuuaacuuuca

SEQ ID NO: 4565 - RNA, 19 nt, Artificial Sequence
  Description of Artificial Sequence: Synthetic oligonucleotide
ccugcccuuuaacuuucag

SEQ ID NO: 4566 - RNA, 19 nt, Artificial Sequence
  Description of Artificial Sequence: Synthetic oligonucleotide
cugcccuuuaacuuucaga

SEQ ID NO: 4567 - RNA, 19 nt, Artificial Sequence
  Description of Artificial Sequence: Synthetic oligonucleotide
ugcccuuuaacuuucagag

SEQ ID NO: 4568 - RNA, 19 nt, Artificial Sequence
  Description of Artificial Sequence: Synthetic oligonucleotide
gcccuuuaacuuucagagg

SEQ ID NO: 4569 - RNA, 19 nt, Artificial Sequence
  Description of Artificial Sequence: Synthetic oligonucleotide
cccuuuaacuuucagaggc

SEQ ID NO: 4570 - RNA, 19 nt, Artificial Sequence
  Description of Artificial Sequence: Synthetic oligonucleotide
ccuuuaacuuucagaggca

SEQ ID NO: 4571 - RNA, 19 nt, Artificial Sequence
  Description of Artificial Sequence: Synthetic oligonucleotide
cuuuaacuuucagaggcaa

SEQ ID NO: 4572 - RNA, 19 nt, Artificial Sequence
  Description of Artificial Sequence: Synthetic oligonucleotide
uuuaacuuucagaggcaau

SEQ ID NO: 4573 - RNA, 19 nt, Artificial Sequence
  Description of Artificial Sequence: Synthetic oligonucleotide
uuaacuuucagaggcaaua

SEQ ID NO: 4574 - RNA, 19 nt, Artificial Sequence
  Description of Artificial Sequence: Synthetic oligonucleotide
uaacuuucagaggcaauag

SEQ ID NO: 4575 - RNA, 19 nt, Artificial Sequence
  Description of Artificial Sequence: Synthetic oligonucleotide
aacuuucagaggcaauagg

SEQ ID NO: 4576 - RNA, 19 nt, Artificial Sequence
  Description of Artificial Sequence: Synthetic oligonucleotide
acuuucagaggcaauaggu

SEQ ID NO: 4577 - RNA, 19 nt, Artificial Sequence
  Description of Artificial Sequence: Synthetic oligonucleotide
cuuucagaggcaauaggua

SEQ ID NO: 4578 - RNA, 19 nt, Artificial Sequence
  Description of Artificial Sequence: Synthetic oligonucleotide
uuucagaggcaauagguaa

SEQ ID NO: 4579 - RNA, 19 nt, Artificial Sequence
  Description of Artificial Sequence: Synthetic oligonucleotide
uucagaggcaauagguaaa

SEQ ID NO: 4580 - RNA, 19 nt, Artificial Sequence
  Description of Artificial Sequence: Synthetic oligonucleotide
ucagaggcaauagguaaau

SEQ ID NO: 4581 - RNA, 19 nt, Artificial Sequence
  Description of Artificial Sequence: Synthetic oligonucleotide
cagaggcaauagguaaaug

SEQ ID NO: 4582 - RNA, 19 nt, Artificial Sequence
  Description of Artificial Sequence: Synthetic oligonucleotide
agaggcaauagguaaaugg

SEQ ID NO: 4583 - RNA, 19 nt, Artificial Sequence
  Description of Artificial Sequence: Synthetic oligonucleotide
gaggcaauagguaaauggg

SEQ ID NO: 4584 - RNA, 19 nt, Artificial Sequence
  Description of Artificial Sequence: Synthetic oligonucleotide
aggcaauagguaaaugggg

SEQ ID NO: 4585 - RNA, 19 nt, Artificial Sequence
  Description of Artificial Sequence: Synthetic oligonucleotide
ggcaauagguaaauggggc

SEQ ID NO: 4586 - RNA, 19 nt, Artificial Sequence
  Description of Artificial Sequence: Synthetic oligonucleotide
gcaauagguaaauggggcc

SEQ ID NO: 4587 - RNA, 19 nt, Artificial Sequence
  Description of Artificial Sequence: Synthetic oligonucleotide
caauagguaaauggggccc

SEQ ID NO: 4588 - RNA, 19 nt, Artificial Sequence
  Description of Artificial Sequence: Synthetic oligonucleotide
aauagguaaauggggccca

SEQ ID NO: 4589 - RNA, 19 nt, Artificial Sequence
  Description of Artificial Sequence: Synthetic oligonucleotide
auagguaaauggggcccau

SEQ ID NO: 4590 - RNA, 19 nt, Artificial Sequence
  Description of Artificial Sequence: Synthetic oligonucleotide
uagguaaauggggcccauu

SEQ ID NO: 4591 - RNA, 19 nt, Artificial Sequence
  Description of Artificial Sequence: Synthetic oligonucleotide
agguaaauggggcccauua

SEQ ID NO: 4592 - RNA, 19 nt, Artificial Sequence
  Description of Artificial Sequence: Synthetic oligonucleotide
gguaaauggggcccauuag

SEQ ID NO: 4593 - RNA, 19 nt, Artificial Sequence
  Description of Artificial Sequence: Synthetic oligonucleotide
guaaauggggcccauuagg

SEQ ID NO: 4594 - RNA, 19 nt, Artificial Sequence
  Description of Artificial Sequence: Synthetic oligonucleotide
uaaauggggcccauuaggu

SEQ ID NO: 4595 - RNA, 19 nt, Artificial Sequence
  Description of Artificial Sequence: Synthetic oligonucleotide
aaauggggcccauuagguc

SEQ ID NO: 4596 - RNA, 19 nt, Artificial Sequence
  Description of Artificial Sequence: Synthetic oligonucleotide
aauggggcccauuaggucc

SEQ ID NO: 4597 - RNA, 19 nt, Artificial Sequence
  Description of Artificial Sequence: Synthetic oligonucleotide
auggggcccauuagguccc

SEQ ID NO: 4598 - RNA, 19 nt, Artificial Sequence
  Description of Artificial Sequence: Synthetic oligonucleotide
uggggcccauuaggucccu

SEQ ID NO: 4599 - RNA, 19 nt, Artificial Sequence
  Description of Artificial Sequence: Synthetic oligonucleotide
ggggcccauuaggucccuc

SEQ ID NO: 4600 - RNA, 19 nt, Artificial Sequence
  Description of Artificial Sequence: Synthetic oligonucleotide
gggcccauuaggucccuca

SEQ ID NO: 4601 - RNA, 19 nt, Artificial Sequence
  Description of Artificial Sequence: Synthetic oligonucleotide
ggcccauuaggucccucac

SEQ ID NO: 4602 - RNA, 19 nt, Artificial Sequence
  Description of Artificial Sequence: Synthetic oligonucleotide
gcccauuaggucccucacu

SEQ ID NO: 4603 - RNA, 19 nt, Artificial Sequence
  Description of Artificial Sequence: Synthetic oligonucleotide
cccauuaggucccucacuc

SEQ ID NO: 4604 - RNA, 19 nt, Artificial Sequence
  Description of Artificial Sequence: Synthetic oligonucleotide
ccauuaggucccucacucc

SEQ ID NO: 4605 - RNA, 19 nt, Artificial Sequence
  Description of Artificial Sequence: Synthetic oligonucleotide
cauuaggucccucacucca

SEQ ID NO: 4606 - RNA, 19 nt, Artificial Sequence
  Description of Artificial Sequence: Synthetic oligonucleotide
auuaggucccucacuccac

SEQ ID NO: 4607 - RNA, 19 nt, Artificial Sequence
  Description of Artificial Sequence: Synthetic oligonucleotide
uuaggucccucacuccaca

SEQ ID NO: 4608 - RNA, 19 nt, Artificial Sequence
  Description of Artificial Sequence: Synthetic oligonucleotide
uaggucccucacuccacag

SEQ ID NO: 4609 - RNA, 19 nt, Artificial Sequence
  Description of Artificial Sequence: Synthetic oligonucleotide
aggucccucacuccacaga

SEQ ID NO: 4610 - RNA, 19 nt, Artificial Sequence
  Description of Artificial Sequence: Synthetic oligonucleotide
ggucccucacuccacagag

SEQ ID NO: 4611 - RNA, 19 nt, Artificial Sequence
  Description of Artificial Sequence: Synthetic oligonucleotide
gucccucacuccacagagu

SEQ ID NO: 4612 - RNA, 19 nt, Artificial Sequence
  Description of Artificial Sequence: Synthetic oligonucleotide
ucccucacuccacagagug

SEQ ID NO: 4613 - RNA, 19 nt, Artificial Sequence
  Description of Artificial Sequence: Synthetic oligonucleotide
cccucacuccacagaguga

SEQ ID NO: 4614 - RNA, 19 nt, Artificial Sequence
  Description of Artificial Sequence: Synthetic oligonucleotide
ccucacuccacagagugag

SEQ ID NO: 4615 - RNA, 19 nt, Artificial Sequence
  Description of Artificial Sequence: Synthetic oligonucleotide
cucacuccacagagugagc

SEQ ID NO: 4616 - RNA, 19 nt, Artificial Sequence
  Description of Artificial Sequence: Synthetic oligonucleotide
ucacuccacagagugagcc

SEQ ID NO: 4617 - RNA, 19 nt, Artificial Sequence
  Description of Artificial Sequence: Synthetic oligonucleotide
cacuccacagagugagcca

SEQ ID NO: 4618 - RNA, 19 nt, Artificial Sequence
  Description of Artificial Sequence: Synthetic oligonucleotide
acuccacagagugagccag

SEQ ID NO: 4619 - RNA, 19 nt, Artificial Sequence
  Description of Artificial Sequence: Synthetic oligonucleotide
cuccacagagugagccagu

SEQ ID NO: 4620 - RNA, 19 nt, Artificial Sequence
  Description of Artificial Sequence: Synthetic oligonucleotide
uccacagagugagccagug

SEQ ID NO: 4621 - RNA, 19 nt, Artificial Sequence
  Description of Artificial Sequence: Synthetic oligonucleotide
ccacagagugagccaguga

SEQ ID NO: 4622 - RNA, 19 nt, Artificial Sequence
  Description of Artificial Sequence: Synthetic oligonucleotide
cacagagugagccagugag

SEQ ID NO: 4623 - RNA, 19 nt, Artificial Sequence
  Description of Artificial Sequence: Synthetic oligonucleotide
acagagugagccagugagg

SEQ ID NO: 4624 - RNA, 19 nt, Artificial Sequence
  Description of Artificial Sequence: Synthetic oligonucleotide
cagagugagccagugaggg

SEQ ID NO: 4625 - RNA, 19 nt, Artificial Sequence
  Description of Artificial Sequence: Synthetic oligonucleotide
agagugagccagugagggc

SEQ ID NO: 4626 - RNA, 19 nt, Artificial Sequence
  Description of Artificial Sequence: Synthetic oligonucleotide
gagugagccagugagggca

SEQ ID NO: 4627 - RNA, 19 nt, Artificial Sequence
  Description of Artificial Sequence: Synthetic oligonucleotide
agugagccagugagggcag

SEQ ID NO: 4628 - RNA, 19 nt, Artificial Sequence
  Description of Artificial Sequence: Synthetic oligonucleotide
gugagccagugagggcagu

SEQ ID NO: 4629 - RNA, 19 nt, Artificial Sequence
  Description of Artificial Sequence: Synthetic oligonucleotide
ugagccagugagggcaguc

SEQ ID NO: 4630 - RNA, 19 nt, Artificial Sequence
  Description of Artificial Sequence: Synthetic oligonucleotide
gagccagugagggcagucc

SEQ ID NO: 4631 - RNA, 19 nt, Artificial Sequence
  Description of Artificial Sequence: Synthetic oligonucleotide
agccagugagggcaguccu

SEQ ID NO: 4632 - RNA, 19 nt, Artificial Sequence
  Description of Artificial Sequence: Synthetic oligonucleotide
gccagugagggcaguccug

SEQ ID NO: 4633 - RNA, 19 nt, Artificial Sequence
  Description of Artificial Sequence: Synthetic oligonucleotide
ccagugagggcaguccugc

SEQ ID NO: 4634 - RNA, 19 nt, Artificial Sequence
  Description of Artificial Sequence: Synthetic oligonucleotide
cagugagggcaguccugca

SEQ ID NO: 4635 - RNA, 19 nt, Artificial Sequence
  Description of Artificial Sequence: Synthetic oligonucleotide
agugagggcaguccugcaa

SEQ ID NO: 4636 - RNA, 19 nt, Artificial Sequence
  Description of Artificial Sequence: Synthetic oligonucleotide
gugagggcaguccugcaac

SEQ ID NO: 4637 - RNA, 19 nt, Artificial Sequence
  Description of Artificial Sequence: Synthetic oligonucleotide
ugagggcaguccugcaaca

SEQ ID NO: 4638 - RNA, 19 nt, Artificial Sequence
  Description of Artificial Sequence: Synthetic oligonucleotide
gagggcaguccugcaacau

SEQ ID NO: 4639 - RNA, 19 nt, Artificial Sequence
  Description of Artificial Sequence: Synthetic oligonucleotide
agggcaguccugcaacaug

SEQ ID NO: 4640 - RNA, 19 nt, Artificial Sequence
  Description of Artificial Sequence: Synthetic oligonucleotide
gggcaguccugcaacaugu

SEQ ID NO: 4641 - RNA, 19 nt, Artificial Sequence
  Description of Artificial Sequence: Synthetic oligonucleotide
ggcaguccugcaacaugua

SEQ ID NO: 4642 - RNA, 19 nt, Artificial Sequence
  Description of Artificial Sequence: Synthetic oligonucleotide
gcaguccugcaacauguau

SEQ ID NO: 4643 - RNA, 19 nt, Artificial Sequence
  Description of Artificial Sequence: Synthetic oligonucleotide
caguccugcaacauguauu

SEQ ID NO: 4644 - RNA, 19 nt, Artificial Sequence
  Description of Artificial Sequence: Synthetic oligonucleotide
aguccugcaacauguauuu

SEQ ID NO: 4645 - RNA, 19 nt, Artificial Sequence
  Description of Artificial Sequence: Synthetic oligonucleotide
guccugcaacauguauuua

SEQ ID NO: 4646 - RNA, 19 nt, Artificial Sequence
  Description of Artificial Sequence: Synthetic oligonucleotide
uccugcaacauguauuuau

SEQ ID NO: 4647 - RNA, 19 nt, Artificial Sequence
  Description of Artificial Sequence: Synthetic oligonucleotide
ccugcaacauguauuuaug

SEQ ID NO: 4648 - RNA, 19 nt, Artificial Sequence
  Description of Artificial Sequence: Synthetic oligonucleotide
cugcaacauguauuuaugg

SEQ ID NO: 4649 - RNA, 19 nt, Artificial Sequence
  Description of Artificial Sequence: Synthetic oligonucleotide
ugcaacauguauuuaugga

SEQ ID NO: 4650 - RNA, 19 nt, Artificial Sequence
  Description of Artificial Sequence: Synthetic oligonucleotide
gcaacauguauuuauggag

SEQ ID NO: 4651 - RNA, 19 nt, Artificial Sequence
  Description of Artificial Sequence: Synthetic oligonucleotide
caacauguauuuauggagu

SEQ ID NO: 4652 - RNA, 19 nt, Artificial Sequence
  Description of Artificial Sequence: Synthetic oligonucleotide
aacauguauuuauggagug

SEQ ID NO: 4653 - RNA, 19 nt, Artificial Sequence
  Description of Artificial Sequence: Synthetic oligonucleotide
acauguauuuauggagugc

SEQ ID NO: 4654 - RNA, 19 nt, Artificial Sequence
  Description of Artificial Sequence: Synthetic oligonucleotide
cauguauuuauggagugcc

SEQ ID NO: 4655 - RNA, 19 nt, Artificial Sequence
  Description of Artificial Sequence: Synthetic oligonucleotide
auguauuuauggagugccu

SEQ ID NO: 4656 - RNA, 19 nt, Artificial Sequence
  Description of Artificial Sequence: Synthetic oligonucleotide
uguauuuauggagugccug

SEQ ID NO: 4657 - RNA, 19 nt, Artificial Sequence
  Description of Artificial Sequence: Synthetic oligonucleotide
guauuuauggagugccugc

SEQ ID NO: 4658 - RNA, 19 nt, Artificial Sequence
  Description of Artificial Sequence: Synthetic oligonucleotide
uauuuauggagugccugcu

SEQ ID NO: 4659 - RNA, 19 nt, Artificial Sequence
  Description of Artificial Sequence: Synthetic oligonucleotide
auuuauggagugccugcug

SEQ ID NO: 4660 - RNA, 19 nt, Artificial Sequence
  Description of Artificial Sequence: Synthetic oligonucleotide
uuuauggagugccugcugu

SEQ ID NO: 4661 - RNA, 19 nt, Artificial Sequence
  Description of Artificial Sequence: Synthetic oligonucleotide
uuauggagugccugcugug

SEQ ID NO: 4662 - RNA, 19 nt, Artificial Sequence
  Description of Artificial Sequence: Synthetic oligonucleotide
uauggagugccugcugugg

SEQ ID NO: 4663 - RNA, 19 nt, Artificial Sequence
  Description of Artificial Sequence: Synthetic oligonucleotide
auggagugccugcugugga

SEQ ID NO: 4664 - RNA, 19 nt, Artificial Sequence
  Description of Artificial Sequence: Synthetic oligonucleotide
uggagugccugcuguggac

SEQ ID NO: 4665 - RNA, 19 nt, Artificial Sequence
  Description of Artificial Sequence: Synthetic oligonucleotide
ggagugccugcuguggacc

SEQ ID NO: 4666 - RNA, 19 nt, Artificial Sequence
  Description of Artificial Sequence: Synthetic oligonucleotide
gagugccugcuguggaccc

SEQ ID NO: 4667 - RNA, 19 nt, Artificial Sequence
  Description of Artificial Sequence: Synthetic oligonucleotide
agugccugcuguggacccu

SEQ ID NO: 4668 - RNA, 19 nt, Artificial Sequence
  Description of Artificial Sequence: Synthetic oligonucleotide
gugccugcuguggacccug

SEQ ID NO: 4669 - RNA, 19 nt, Artificial Sequence
  Description of Artificial Sequence: Synthetic oligonucleotide
ugccugcuguggacccugu

SEQ ID NO: 4670 - RNA, 19 nt, Artificial Sequence
  Description of Artificial Sequence: Synthetic oligonucleotide
gccugcuguggacccuguc

SEQ ID NO: 4671 - RNA, 19 nt, Artificial Sequence
  Description of Artificial Sequence: Synthetic oligonucleotide
ccugcuguggacccugucu

SEQ ID NO: 4672 - RNA, 19 nt, Artificial Sequence
  Description of Artificial Sequence: Synthetic oligonucleotide
cugcuguggacccugucuu

SEQ ID NO: 4673 - RNA, 19 nt, Artificial Sequence
  Description of Artificial Sequence: Synthetic oligonucleotide
ugcuguggacccugucuuc

SEQ ID NO: 4674 - RNA, 19 nt, Artificial Sequence
  Description of Artificial Sequence: Synthetic oligonucleotide
gcuguggacccugucuucu

SEQ ID NO: 4675 - RNA, 19 nt, Artificial Sequence
  Description of Artificial Sequence: Synthetic oligonucleotide
cuguggacccugucuucug

SEQ ID NO: 4676 - RNA, 19 nt, Artificial Sequence
  Description of Artificial Sequence: Synthetic oligonucleotide
uguggacccugucuucugg

SEQ ID NO: 4677 - RNA, 19 nt, Artificial Sequence
  Description of Artificial Sequence: Synthetic oligonucleotide
guggacccugucuucuggg

SEQ ID NO: 4678 - RNA, 19 nt, Artificial Sequence
  Description of Artificial Sequence: Synthetic oligonucleotide
uggacccugucuucugggc

SEQ ID NO: 4679 - RNA, 19 nt, Artificial Sequence
  Description of Artificial Sequence: Synthetic oligonucleotide
ggacccugucuucugggca

SEQ ID NO: 4680 - RNA, 19 nt, Artificial Sequence
  Description of Artificial Sequence: Synthetic oligonucleotide
gacccugucuucugggcac

SEQ ID NO: 4681 - RNA, 19 nt, Artificial Sequence
  Description of Artificial Sequence: Synthetic oligonucleotide
acccugucuucugggcaca

SEQ ID NO: 4682 - RNA, 19 nt, Artificial Sequence
  Description of Artificial Sequence: Synthetic oligonucleotide
cccugucuucugggcacag

SEQ ID NO: 4683 - RNA, 19 nt, Artificial Sequence
  Description of Artificial Sequence: Synthetic oligonucleotide
ccugucuucugggcacagu

SEQ ID NO: 4684 - RNA, 19 nt, Artificial Sequence
  Description of Artificial Sequence: Synthetic oligonucleotide
cugucuucugggcacagug

SEQ ID NO: 4685 - RNA, 19 nt, Artificial Sequence
  Description of Artificial Sequence: Synthetic oligonucleotide
ugucuucugggcacagugg

SEQ ID NO: 4686 - RNA, 19 nt, Artificial Sequence
  Description of Artificial Sequence: Synthetic oligonucleotide
gucuucugggcacagugga

SEQ ID NO: 4687 - RNA, 19 nt, Artificial Sequence
  Description of Artificial Sequence: Synthetic oligonucleotide
ucuucugggcacaguggac

SEQ ID NO: 4688 - RNA, 19 nt, Artificial Sequence
  Description of Artificial Sequence: Synthetic oligonucleotide
cuucugggcacaguggacu

SEQ ID NO: 4689 - RNA, 19 nt, Artificial Sequence
  Description of Artificial Sequence: Synthetic oligonucleotide
uucugggcacaguggacuc

SEQ ID NO: 4690 - RNA, 19 nt, Artificial Sequence
  Description of Artificial Sequence: Synthetic oligonucleotide
ucugggcacaguggacuca

SEQ ID NO: 4691 - RNA, 19 nt, Artificial Sequence
  Description of Artificial Sequence: Synthetic oligonucleotide
cugggcacaguggacucag

SEQ ID NO: 4692 - RNA, 19 nt, Artificial Sequence
  Description of Artificial Sequence: Synthetic oligonucleotide
ugggcacaguggacucagc

SEQ ID NO: 4693 - RNA, 19 nt, Artificial Sequence
  Description of Artificial Sequence: Synthetic oligonucleotide
gggcacaguggacucagca

SEQ ID NO: 4694 - RNA, 19 nt, Artificial Sequence
  Description of Artificial Sequence: Synthetic oligonucleotide
ggcacaguggacucagcag

SEQ ID NO: 4695 - RNA, 19 nt, Artificial Sequence
  Description of Artificial Sequence: Synthetic oligonucleotide
gcacaguggacucagcagu

SEQ ID NO: 4696 - RNA, 19 nt, Artificial Sequence
  Description of Artificial Sequence: Synthetic oligonucleotide
cacaguggacucagcagug

SEQ ID NO: 4697 - RNA, 19 nt, Artificial Sequence
  Description of Artificial Sequence: Synthetic oligonucleotide
acaguggacucagcaguga

SEQ ID NO: 4698 - RNA, 19 nt, Artificial Sequence
  Description of Artificial Sequence: Synthetic oligonucleotide
caguggacucagcagugac

SEQ ID NO: 4699 - RNA, 19 nt, Artificial Sequence
  Description of Artificial Sequence: Synthetic oligonucleotide
aguggacucagcagugacc

SEQ ID NO: 4700 - RNA, 19 nt, Artificial Sequence
  Description of Artificial Sequence: Synthetic oligonucleotide
guggacucagcagugacca

SEQ ID NO: 4701 - RNA, 19 nt, Artificial Sequence
  Description of Artificial Sequence: Synthetic oligonucleotide
uggacucagcagugaccac

SEQ ID NO: 4702 - RNA, 19 nt, Artificial Sequence
  Description of Artificial Sequence: Synthetic oligonucleotide
ggacucagcagugaccaca

SEQ ID NO: 4703 - RNA, 19 nt, Artificial Sequence
  Description of Artificial Sequence: Synthetic oligonucleotide
gacucagcagugaccacac

SEQ ID NO: 4704 - RNA, 19 nt, Artificial Sequence
  Description of Artificial Sequence: Synthetic oligonucleotide
acucagcagugaccacacc

SEQ ID NO: 4705 - RNA, 19 nt, Artificial Sequence
  Description of Artificial Sequence: Synthetic oligonucleotide
cucagcagugaccacacca

SEQ ID NO: 4706 - RNA, 19 nt, Artificial Sequence
  Description of Artificial Sequence: Synthetic oligonucleotide
ucagcagugaccacaccaa

SEQ ID NO: 4707 - RNA, 19 nt, Artificial Sequence
  Description of Artificial Sequence: Synthetic oligonucleotide
cagcagugaccacaccaac

SEQ ID NO: 4708 - RNA, 19 nt, Artificial Sequence
  Description of Artificial Sequence: Synthetic oligonucleotide
agcagugaccacaccaaca

SEQ ID NO: 4709 - RNA, 19 nt, Artificial Sequence
  Description of Artificial Sequence: Synthetic oligonucleotide
gcagugaccacaccaacac

SEQ ID NO: 4710 - RNA, 19 nt, Artificial Sequence
  Description of Artificial Sequence: Synthetic oligonucleotide
cagugaccacaccaacacu

SEQ ID NO: 4711 - RNA, 19 nt, Artificial Sequence
  Description of Artificial Sequence: Synthetic oligonucleotide
agugaccacaccaacacug

SEQ ID NO: 4712 - RNA, 19 nt, Artificial Sequence
  Description of Artificial Sequence: Synthetic oligonucleotide
gugaccacaccaacacuga

SEQ ID NO: 4713 - RNA, 19 nt, Artificial Sequence
  Description of Artificial Sequence: Synthetic oligonucleotide
ugaccacaccaacacugac

SEQ ID NO: 4714 - RNA, 19 nt, Artificial Sequence
  Description of Artificial Sequence: Synthetic oligonucleotide
gaccacaccaacacugacc

SEQ ID NO: 4715 - RNA, 19 nt, Artificial Sequence
  Description of Artificial Sequence: Synthetic oligonucleotide
accacaccaacacugaccc

SEQ ID NO: 4716 - RNA, 19 nt, Artificial Sequence
  Description of Artificial Sequence: Synthetic oligonucleotide
ccacaccaacacugacccu

SEQ ID NO: 4717 - RNA, 19 nt, Artificial Sequence
  Description of Artificial Sequence: Synthetic oligonucleotide
cacaccaacacugacccuu

SEQ ID NO: 4718 - RNA, 19 nt, Artificial Sequence
  Description of Artificial Sequence: Synthetic oligonucleotide
acaccaacacugacccuug

SEQ ID NO: 4719 - RNA, 19 nt, Artificial Sequence
  Description of Artificial Sequence: Synthetic oligonucleotide
caccaacacugacccuuga

SEQ ID NO: 4720 - RNA, 19 nt, Artificial Sequence
  Description of Artificial Sequence: Synthetic oligonucleotide
accaacacugacccuugaa

SEQ ID NO: 4721 - RNA, 19 nt, Artificial Sequence
  Description of Artificial Sequence: Synthetic oligonucleotide
ccaacacugacccuugaac

SEQ ID NO: 4722 - RNA, 19 nt, Artificial Sequence
  Description of Artificial Sequence: Synthetic oligonucleotide
caacacugacccuugaacc

SEQ ID NO: 4723 - RNA, 19 nt, Artificial Sequence
  Description of Artificial Sequence: Synthetic oligonucleotide
aacacugacccuugaacca

SEQ ID NO: 4724 - RNA, 19 nt, Artificial Sequence
  Description of Artificial Sequence: Synthetic oligonucleotide
acacugacccuugaaccaa

SEQ ID NO: 4725 - RNA, 19 nt, Artificial Sequence
  Description of Artificial Sequence: Synthetic oligonucleotide
cacugacccuugaaccaau

SEQ ID NO: 4726 - RNA, 19 nt, Artificial Sequence
  Description of Artificial Sequence: Synthetic oligonucleotide
acugacccuugaaccaaua

SEQ ID NO: 4727 - RNA, 19 nt, Artificial Sequence
  Description of Artificial Sequence: Synthetic oligonucleotide
cugacccuugaaccaauaa

SEQ ID NO: 4728 - RNA, 19 nt, Artificial Sequence
  Description of Artificial Sequence: Synthetic oligonucleotide
ugacccuugaaccaauaaa

SEQ ID NO: 4729 - RNA, 19 nt, Artificial Sequence
  Description of Artificial Sequence: Synthetic oligonucleotide
gacccuugaaccaauaaag

SEQ ID NO: 4730 - RNA, 19 nt, Artificial Sequence
  Description of Artificial Sequence: Synthetic oligonucleotide
acccuugaaccaauaaagg

SEQ ID NO: 4731 - RNA, 19 nt, Artificial Sequence
  Description of Artificial Sequence: Synthetic oligonucleotide
cccuugaaccaauaaagga

SEQ ID NO: 4732 - RNA, 19 nt, Artificial Sequence
  Description of Artificial Sequence: Synthetic oligonucleotide
ccuugaaccaauaaaggaa

SEQ ID NO: 4733 - RNA, 19 nt, Artificial Sequence
  Description of Artificial Sequence: Synthetic oligonucleotide
cuugaaccaauaaaggaac

SEQ ID NO: 4734 - RNA, 19 nt, Artificial Sequence
  Description of Artificial Sequence: Synthetic oligonucleotide
uugaaccaauaaaggaaca

SEQ ID NO: 4735 - RNA, 19 nt, Artificial Sequence
  Description of Artificial Sequence: Synthetic oligonucleotide
ugaaccaauaaaggaacaa

SEQ ID NO: 4736 - RNA, 19 nt, Artificial Sequence
  Description of Artificial Sequence: Synthetic oligonucleotide
gaaccaauaaaggaacaaa

SEQ ID NO: 4737 - RNA, 19 nt, Artificial Sequence
  Description of Artificial Sequence: Synthetic oligonucleotide
aaccaauaaaggaacaaau

SEQ ID NO: 4738 - RNA, 19 nt, Artificial Sequence
  Description of Artificial Sequence: Synthetic oligonucleotide
accaauaaaggaacaaaug

SEQ ID NO: 4739 - RNA, 19 nt, Artificial Sequence
  Description of Artificial Sequence: Synthetic oligonucleotide
ccaauaaaggaacaaauga

SEQ ID NO: 4740 - RNA, 19 nt, Artificial Sequence
  Description of Artificial Sequence: Synthetic oligonucleotide
caauaaaggaacaaaugac

SEQ ID NO: 4741 - RNA, 19 nt, Artificial Sequence
  Description of Artificial Sequence: Synthetic oligonucleotide
aauaaaggaacaaaugacu

SEQ ID NO: 4742 - RNA, 19 nt, Artificial Sequence
  Description of Artificial Sequence: Synthetic oligonucleotide
auaaaggaacaaaugacua

SEQ ID NO: 4743 - RNA, 19 nt, Artificial Sequence
  Description of Artificial Sequence: Synthetic oligonucleotide
uaaaggaacaaaugacuau

SEQ ID NO: 4744 - RNA, 19 nt, Artificial Sequence
  Description of Artificial Sequence: Synthetic oligonucleotide
aaaggaacaaaugacuauu

SEQ ID NO: 4745 - RNA, 19 nt, Artificial Sequence
  Description of Artificial Sequence: Synthetic oligonucleotide
aaggaacaaaugacuauua

SEQ ID NO: 4746 - RNA, 19 nt, Artificial Sequence
  Description of Artificial Sequence: Synthetic oligonucleotide
aggaacaaaugacuauuaa

SEQ ID NO: 4747 - RNA, 19 nt, Artificial Sequence
  Description of Artificial Sequence: Synthetic oligonucleotide
ggaacaaaugacuauuaaa

SEQ ID NO: 4748 - RNA, 19 nt, Artificial Sequence
  Description of Artificial Sequence: Synthetic oligonucleotide
gaacaaaugacuauuaaag

SEQ ID NO: 4749 - RNA, 19 nt, Artificial Sequence
  Description of Artificial Sequence: Synthetic oligonucleotide
aacaaaugacuauuaaagc

SEQ ID NO: 4750 - RNA, 19 nt, Artificial Sequence
  Description of Artificial Sequence: Synthetic oligonucleotide
acaaaugacuauuaaagca

SEQ ID NO: 4751 - RNA, 19 nt, Artificial Sequence
  Description of Artificial Sequence: Synthetic oligonucleotide
caaaugacuauuaaagcac

SEQ ID NO: 4752 - RNA, 19 nt, Artificial Sequence
  Description of Artificial Sequence: Synthetic oligonucleotide
aaaugacuauuaaagcaca

SEQ ID NO: 4753 - RNA, 19 nt, Artificial Sequence
  Description of Artificial Sequence: Synthetic oligonucleotide
aaugacuauuaaagcacaa

SEQ ID NO: 4754 - RNA, 19 nt, Artificial Sequence
  Description of Artificial Sequence: Synthetic oligonucleotide
augacuauuaaagcacaaa

SEQ ID NO: 4755 - RNA, 19 nt, Artificial Sequence
  Description of Artificial Sequence: Synthetic oligonucleotide
ccagccgccgcuguacacu

SEQ ID NO: 4756 - RNA, 19 nt, Artificial Sequence
  Description of Artificial Sequence: Synthetic oligonucleotide
cccagccgccgcuguacac

SEQ ID NO: 4757 - RNA, 19 nt, Artificial Sequence
  Description of Artificial Sequence: Synthetic oligonucleotide
ccccagccgccgcuguaca

SEQ ID NO: 4758 - RNA, 19 nt, Artificial Sequence
  Description of Artificial Sequence: Synthetic oligonucleotide
gccccagccgccgcuguac

SEQ ID NO: 4759 - RNA, 19 nt, Artificial Sequence
  Description of Artificial Sequence: Synthetic oligonucleotide
cgccccagccgccgcugua

SEQ ID NO: 4760 - RNA, 19 nt, Artificial Sequence
  Description of Artificial Sequence: Synthetic oligonucleotide
ccgccccagccgccgcugu

SEQ ID NO: 4761 - RNA, 19 nt, Artificial Sequence
  Description of Artificial Sequence: Synthetic oligonucleotide
gccgccccagccgccgcug

SEQ ID NO: 4762 - RNA, 19 nt, Artificial Sequence
  Description of Artificial Sequence: Synthetic oligonucleotide
ugccgccccagccgccgcu

SEQ ID NO: 4763 - RNA, 19 nt, Artificial Sequence
  Description of Artificial Sequence: Synthetic oligonucleotide
cugccgccccagccgccgc

SEQ ID NO: 4764 - RNA, 19 nt, Artificial Sequence
  Description of Artificial Sequence: Synthetic oligonucleotide
ccugccgccccagccgccg

SEQ ID NO: 4765 - RNA, 19 nt, Artificial Sequence
  Description of Artificial Sequence: Synthetic oligonucleotide
accugccgccccagccgcc

SEQ ID NO: 4766 - RNA, 19 nt, Artificial Sequence
  Description of Artificial Sequence: Synthetic oligonucleotide
caccugccgccccagccgc

SEQ ID NO: 4767 - RNA, 19 nt, Artificial Sequence
  Description of Artificial Sequence: Synthetic oligonucleotide
ucaccugccgccccagccg

SEQ ID NO: 4768 - RNA, 19 nt, Artificial Sequence
  Description of Artificial Sequence: Synthetic oligonucleotide
cucaccugccgccccagcc

SEQ ID NO: 4769 - RNA, 19 nt, Artificial Sequence
  Description of Artificial Sequence: Synthetic oligonucleotide
ccucaccugccgccccagc

SEQ ID NO: 4770 - RNA, 19 nt, Artificial Sequence
  Description of Artificial Sequence: Synthetic oligonucleotide
gccucaccugccgccccag

SEQ ID NO: 4771 - RNA, 19 nt, Artificial Sequence
  Description of Artificial Sequence: Synthetic oligonucleotide
cgccucaccugccgcccca

SEQ ID NO: 4772 - RNA, 19 nt, Artificial Sequence
  Description of Artificial Sequence: Synthetic oligonucleotide
ccgccucaccugccgcccc

SEQ ID NO: 4773 - RNA, 19 nt, Artificial Sequence
  Description of Artificial Sequence: Synthetic oligonucleotide
gccgccucaccugccgccc

SEQ ID NO: 4774 - RNA, 19 nt, Artificial Sequence
  Description of Artificial Sequence: Synthetic oligonucleotide
agccgccucaccugccgcc

SEQ ID NO: 4775 - RNA, 19 nt, Artificial Sequence
  Description of Artificial Sequence: Synthetic oligonucleotide
cagccgccucaccugccgc

SEQ ID NO: 4776 - RNA, 19 nt, Artificial Sequence
  Description of Artificial Sequence: Synthetic oligonucleotide
ccagccgccucaccugccg

SEQ ID NO: 4777 - RNA, 19 nt, Artificial Sequence
  Description of Artificial Sequence: Synthetic oligonucleotide
cccagccgccucaccugcc

SEQ ID NO: 4778 - RNA, 19 nt, Artificial Sequence
  Description of Artificial Sequence: Synthetic oligonucleotide
ccccagccgccucaccugc

SEQ ID NO: 4779 - RNA, 19 nt, Artificial Sequence
  Description of Artificial Sequence: Synthetic oligonucleotide
gccccagccgccucaccug

SEQ ID NO: 4780 - RNA, 19 nt, Artificial Sequence
  Description of Artificial Sequence: Synthetic oligonucleotide
cgccccagccgccucaccu

SEQ ID NO: 4781 - RNA, 19 nt, Artificial Sequence
  Description of Artificial Sequence: Synthetic oligonucleotide
acgccccagccgccucacc

SEQ ID NO: 4782 - RNA, 19 nt, Artificial Sequence
  Description of Artificial Sequence: Synthetic oligonucleotide
aacgccccagccgccucac

SEQ ID NO: 4783 - RNA, 19 nt, Artificial Sequence
  Description of Artificial Sequence: Synthetic oligonucleotide
caacgccccagccgccuca

SEQ ID NO: 4784 - RNA, 19 nt, Artificial Sequence
  Description of Artificial Sequence: Synthetic oligonucleotide
gcaacgccccagccgccuc

SEQ ID NO: 4785 - RNA, 19 nt, Artificial Sequence
  Description of Artificial Sequence: Synthetic oligonucleotide
agcaacgccccagccgccu

SEQ ID NO: 4786 - RNA, 19 nt, Artificial Sequence
  Description of Artificial Sequence: Synthetic oligonucleotide
cagcaacgccccagccgcc

SEQ ID NO: 4787 - RNA, 19 nt, Artificial Sequence
  Description of Artificial Sequence: Synthetic oligonucleotide
acagcaacgccccagccgc

SEQ ID NO: 4788 - RNA, 19 nt, Artificial Sequence
  Description of Artificial Sequence: Synthetic oligonucleotide
gacagcaacgccccagccg

SEQ ID NO: 4789 - RNA, 19 nt, Artificial Sequence
  Description of Artificial Sequence: Synthetic oligonucleotide
cgacagcaacgccccagcc

SEQ ID NO: 4790 - RNA, 19 nt, Artificial Sequence
  Description of Artificial Sequence: Synthetic oligonucleotide
acgacagcaacgccccagc

SEQ ID NO: 4791 - RNA, 19 nt, Artificial Sequence
  Description of Artificial Sequence: Synthetic oligonucleotide
cacgacagcaacgccccag

SEQ ID NO: 4792 - RNA, 19 nt, Artificial Sequence
  Description of Artificial Sequence: Synthetic oligonucleotide
gcacgacagcaacgcccca

SEQ ID NO: 4793 - RNA, 19 nt, Artificial Sequence
  Description of Artificial Sequence: Synthetic oligonucleotide
cgcacgacagcaacgcccc

SEQ ID NO: 4794 - RNA, 19 nt, Artificial Sequence
  Description of Artificial Sequence: Synthetic oligonucleotide
acgcacgacagcaacgccc

SEQ ID NO: 4795 - RNA, 19 nt, Artificial Sequence
  Description of Artificial Sequence: Synthetic oligonucleotide
gacgcacgacagcaacgcc

SEQ ID NO: 4796 - RNA, 19 nt, Artificial Sequence
  Description of Artificial Sequence: Synthetic oligonucleotide
ggacgcacgacagcaacgc

SEQ ID NO: 4797 - RNA, 19 nt, Artificial Sequence
  Description of Artificial Sequence: Synthetic oligonucleotide
cggacgcacgacagcaacg

SEQ ID NO: 4798 - RNA, 19 nt, Artificial Sequence
  Description of Artificial Sequence: Synthetic oligonucleotide
gcggacgcacgacagcaac

SEQ ID NO: 4799 - RNA, 19 nt, Artificial Sequence
  Description of Artificial Sequence: Synthetic oligonucleotide
ugcggacgcacgacagcaa

SEQ ID NO: 4800 - RNA, 19 nt, Artificial Sequence
  Description of Artificial Sequence: Synthetic oligonucleotide
cugcggacgcacgacagca

SEQ ID NO: 4801 - RNA, 19 nt, Artificial Sequence
  Description of Artificial Sequence: Synthetic oligonucleotide
ccugcggacgcacgacagc

SEQ ID NO: 4802 - RNA, 19 nt, Artificial Sequence
  Description of Artificial Sequence: Synthetic oligonucleotide
gccugcggacgcacgacag

SEQ ID NO: 4803 - RNA, 19 nt, Artificial Sequence
  Description of Artificial Sequence: Synthetic oligonucleotide
cgccugcggacgcacgaca

SEQ ID NO: 4804 - RNA, 19 nt, Artificial Sequence
  Description of Artificial Sequence: Synthetic oligonucleotide
acgccugcggacgcacgac

SEQ ID NO: 4805 - RNA, 19 nt, Artificial Sequence
  Description of Artificial Sequence: Synthetic oligonucleotide
gacgccugcggacgcacga

SEQ ID NO: 4806 - RNA, 19 nt, Artificial Sequence
  Description of Artificial Sequence: Synthetic oligonucleotide
ugacgccugcggacgcacg

SEQ ID NO: 4807 - RNA, 19 nt, Artificial Sequence
  Description of Artificial Sequence: Synthetic oligonucleotide
cugacgccugcggacgcac

SEQ ID NO: 4808 - RNA, 19 nt, Artificial Sequence
  Description of Artificial Sequence: Synthetic oligonucleotide
ccugacgccugcggacgca

SEQ ID NO: 4809 - RNA, 19 nt, Artificial Sequence
  Description of Artificial Sequence: Synthetic oligonucleotide
accugacgccugcggacgc

SEQ ID NO: 4810 - RNA, 19 nt, Artificial Sequence
  Description of Artificial Sequence: Synthetic oligonucleotide
caccugacgccugcggacg

SEQ ID NO: 4811 - RNA, 19 nt, Artificial Sequence
  Description of Artificial Sequence: Synthetic oligonucleotide
gcaccugacgccugcggac

SEQ ID NO: 4812 - RNA, 19 nt, Artificial Sequence
  Description of Artificial Sequence: Synthetic oligonucleotide
agcaccugacgccugcgga

SEQ ID NO: 4813 - RNA, 19 nt, Artificial Sequence
  Description of Artificial Sequence: Synthetic oligonucleotide
gagcaccugacgccugcgg

SEQ ID NO: 4814 - RNA, 19 nt, Artificial Sequence
  Description of Artificial Sequence: Synthetic oligonucleotide
ugagcaccugacgccugcg

SEQ ID NO: 4815 - RNA, 19 nt, Artificial Sequence
  Description of Artificial Sequence: Synthetic oligonucleotide
cugagcaccugacgccugc

SEQ ID NO: 4816 - RNA, 19 nt, Artificial Sequence
  Description of Artificial Sequence: Synthetic oligonucleotide
ucugagcaccugacgccug

SEQ ID NO: 4817 - RNA, 19 nt, Artificial Sequence
  Description of Artificial Sequence: Synthetic oligonucleotide
gucugagcaccugacgccu

SEQ ID NO: 4818 - RNA, 19 nt, Artificial Sequence
  Description of Artificial Sequence: Synthetic oligonucleotide
ggucugagcaccugacgcc

SEQ ID NO: 4819 - RNA, 19 nt, Artificial Sequence
  Description of Artificial Sequence: Synthetic oligonucleotide
gggucugagcaccugacgc

SEQ ID NO: 4820 - RNA, 19 nt, Artificial Sequence
  Description of Artificial Sequence: Synthetic oligonucleotide
cgggucugagcaccugacg

SEQ ID NO: 4821 - RNA, 19 nt, Artificial Sequence
  Description of Artificial Sequence: Synthetic oligonucleotide
ucgggucugagcaccugac

SEQ ID NO: 4822 - RNA, 19 nt, Artificial Sequence
  Description of Artificial Sequence: Synthetic oligonucleotide
cucgggucugagcaccuga

SEQ ID NO: 4823 - RNA, 19 nt, Artificial Sequence
  Description of Artificial Sequence: Synthetic oligonucleotide
ccucgggucugagcaccug

SEQ ID NO: 4824 - RNA, 19 nt, Artificial Sequence
  Description of Artificial Sequence: Synthetic oligonucleotide
cccucgggucugagcaccu

SEQ ID NO: 4825 - RNA, 19 nt, Artificial Sequence
  Description of Artificial Sequence: Synthetic oligonucleotide
gcccucgggucugagcacc

SEQ ID NO: 4826 - RNA, 19 nt, Artificial Sequence
  Description of Artificial Sequence: Synthetic oligonucleotide
ggcccucgggucugagcac

SEQ ID NO: 4827 - RNA, 19 nt, Artificial Sequence
  Description of Artificial Sequence: Synthetic oligonucleotide
cggcccucgggucugagca

SEQ ID NO: 4828 - RNA, 19 nt, Artificial Sequence
  Description of Artificial Sequence: Synthetic oligonucleotide
ccggcccucgggucugagc

SEQ ID NO: 4829 - RNA, 19 nt, Artificial Sequence
  Description of Artificial Sequence: Synthetic oligonucleotide
cccggcccucgggucugag

SEQ ID NO: 4830 - RNA, 19 nt, Artificial Sequence
  Description of Artificial Sequence: Synthetic oligonucleotide
ucccggcccucgggucuga

SEQ ID NO: 4831 - RNA, 19 nt, Artificial Sequence
  Description of Artificial Sequence: Synthetic oligonucleotide
uucccggcccucgggucug

SEQ ID NO: 4832 - RNA, 19 nt, Artificial Sequence
  Description of Artificial Sequence: Synthetic oligonucleotide
cuucccggcccucgggucu

SEQ ID NO: 4833 - RNA, 19 nt, Artificial Sequence
  Description of Artificial Sequence: Synthetic oligonucleotide
ccuucccggcccucggguc

SEQ ID NO: 4834 - RNA, 19 nt, Artificial Sequence
  Description of Artificial Sequence: Synthetic oligonucleotide
cccuucccggcccucgggu

SEQ ID NO: 4835 - RNA, 19 nt, Artificial Sequence
  Description of Artificial Sequence: Synthetic oligonucleotide
ucccuucccggcccucggg

SEQ ID NO: 4836 - RNA, 19 nt, Artificial Sequence
  Description of Artificial Sequence: Synthetic oligonucleotide
aucccuucccggcccucgg

SEQ ID NO: 4837 - RNA, 19 nt, Artificial Sequence
  Description of Artificial Sequence: Synthetic oligonucleotide
aaucccuucccggcccucg

SEQ ID NO: 4838 - RNA, 19 nt, Artificial Sequence
  Description of Artificial Sequence: Synthetic oligonucleotide
aaaucccuucccggcccuc

SEQ ID NO: 4839 - RNA, 19 nt, Artificial Sequence
  Description of Artificial Sequence: Synthetic oligonucleotide
caaaucccuucccggcccu

SEQ ID NO: 4840 - RNA, 19 nt, Artificial Sequence
  Description of Artificial Sequence: Synthetic oligonucleotide
ccaaaucccuucccggccc

SEQ ID NO: 4841 - RNA, 19 nt, Artificial Sequence
  Description of Artificial Sequence: Synthetic oligonucleotide
cccaaaucccuucccggcc

SEQ ID NO: 4842 - RNA, 19 nt, Artificial Sequence
  Description of Artificial Sequence: Synthetic oligonucleotide
acccaaaucccuucccggc

SEQ ID NO: 4843 - RNA, 19 nt, Artificial Sequence
  Description of Artificial Sequence: Synthetic oligonucleotide
aacccaaaucccuucccgg

SEQ ID NO: 4844 - RNA, 19 nt, Artificial Sequence
  Description of Artificial Sequence: Synthetic oligonucleotide
aaacccaaaucccuucccg

SEQ ID NO: 4845 - RNA, 19 nt, Artificial Sequence
  Description of Artificial Sequence: Synthetic oligonucleotide
gaaacccaaaucccuuccc

SEQ ID NO: 4846 - RNA, 19 nt, Artificial Sequence
  Description of Artificial Sequence: Synthetic oligonucleotide
ugaaacccaaaucccuucc

SEQ ID NO: 4847 - RNA, 19 nt, Artificial Sequence
  Description of Artificial Sequence: Synthetic oligonucleotide
gugaaacccaaaucccuuc

SEQ ID NO: 4848 - RNA, 19 nt, Artificial Sequence
  Description of Artificial Sequence: Synthetic oligonucleotide
ugugaaacccaaaucccuu

SEQ ID NO: 4849 - RNA, 19 nt, Artificial Sequence
  Description of Artificial Sequence: Synthetic oligonucleotide
cugugaaacccaaaucccu

SEQ ID NO: 4850 - RNA, 19 nt, Artificial Sequence
  Description of Artificial Sequence: Synthetic oligonucleotide
ccugugaaacccaaauccc

SEQ ID NO: 4851 - RNA, 19 nt, Artificial Sequence
  Description of Artificial Sequence: Synthetic oligonucleotide
uccugugaaacccaaaucc

SEQ ID NO: 4852 - RNA, 19 nt, Artificial Sequence
  Description of Artificial Sequence: Synthetic oligonucleotide
uuccugugaaacccaaauc

SEQ ID NO: 4853 - RNA, 19 nt, Artificial Sequence
  Description of Artificial Sequence: Synthetic oligonucleotide
guuccugugaaacccaaau

SEQ ID NO: 4854 - RNA, 19 nt, Artificial Sequence
  Description of Artificial Sequence: Synthetic oligonucleotide
gguuccugugaaacccaaa

SEQ ID NO: 4855 - RNA, 19 nt, Artificial Sequence
  Description of Artificial Sequence: Synthetic oligonucleotide
agguuccugugaaacccaa

SEQ ID NO: 4856 - RNA, 19 nt, Artificial Sequence
  Description of Artificial Sequence: Synthetic oligonucleotide
cagguuccugugaaaccca

SEQ ID NO: 4857 - RNA, 19 nt, Artificial Sequence
  Description of Artificial Sequence: Synthetic oligonucleotide
ccagguuccugugaaaccc

SEQ ID NO: 4858 - RNA, 19 nt, Artificial Sequence
  Description of Artificial Sequence: Synthetic oligonucleotide
cccagguuccugugaaacc

SEQ ID NO: 4859 - RNA, 19 nt, Artificial Sequence
  Description of Artificial Sequence: Synthetic oligonucleotide
ccccagguuccugugaaac

SEQ ID NO: 4860 - RNA, 19 nt, Artificial Sequence
  Description of Artificial Sequence: Synthetic oligonucleotide
gccccagguuccugugaaa

SEQ ID NO: 4861 - RNA, 19 nt, Artificial Sequence
  Description of Artificial Sequence: Synthetic oligonucleotide
cgccccagguuccugugaa

SEQ ID NO: 4862 - RNA, 19 nt, Artificial Sequence
  Description of Artificial Sequence: Synthetic oligonucleotide
ccgccccagguuccuguga

SEQ ID NO: 4863 - RNA, 19 nt, Artificial Sequence
  Description of Artificial Sequence: Synthetic oligonucleotide
cccgccccagguuccugug

SEQ ID NO: 4864 - RNA, 19 nt, Artificial Sequence
  Description of Artificial Sequence: Synthetic oligonucleotide
ccccgccccagguuccugu

SEQ ID NO: 4865 - RNA, 19 nt, Artificial Sequence
  Description of Artificial Sequence: Synthetic oligonucleotide
cccccgccccagguuccug

SEQ ID NO: 4866 - RNA, 19 nt, Artificial Sequence
  Description of Artificial Sequence: Synthetic oligonucleotide
acccccgccccagguuccu

SEQ ID NO: 4867 - RNA, 19 nt, Artificial Sequence
  Description of Artificial Sequence: Synthetic oligonucleotide
gacccccgccccagguucc

SEQ ID NO: 4868 - RNA, 19 nt, Artificial Sequence
  Description of Artificial Sequence: Synthetic oligonucleotide
ggacccccgccccagguuc

SEQ ID NO: 4869 - RNA, 19 nt, Artificial Sequence
  Description of Artificial Sequence: Synthetic oligonucleotide
cggacccccgccccagguu

SEQ ID NO: 4870 - RNA, 19 nt, Artificial Sequence
  Description of Artificial Sequence: Synthetic oligonucleotide
gcggacccccgccccaggu

SEQ ID NO: 4871 - RNA, 19 nt, Artificial Sequence
  Description of Artificial Sequence: Synthetic oligonucleotide
agcggacccccgccccagg

SEQ ID NO: 4872 - RNA, 19 nt, Artificial Sequence
  Description of Artificial Sequence: Synthetic oligonucleotide
uagcggacccccgccccag

SEQ ID NO: 4873 - RNA, 19 nt, Artificial Sequence
  Description of Artificial Sequence: Synthetic oligonucleotide
auagcggacccccgcccca

SEQ ID NO: 4874 - RNA, 19 nt, Artificial Sequence
  Description of Artificial Sequence: Synthetic oligonucleotide
gauagcggacccccgcccc

SEQ ID NO: 4875 - RNA, 19 nt, Artificial Sequence
  Description of Artificial Sequence: Synthetic oligonucleotide
agauagcggacccccgccc

SEQ ID NO: 4876 - RNA, 19 nt, Artificial Sequence
  Description of Artificial Sequence: Synthetic oligonucleotide
aagauagcggacccccgcc

SEQ ID NO: 4877 - RNA, 19 nt, Artificial Sequence
  Description of Artificial Sequence: Synthetic oligonucleotide
caagauagcggacccccgc

SEQ ID NO: 4878 - RNA, 19 nt, Artificial Sequence
  Description of Artificial Sequence: Synthetic oligonucleotide
ccaagauagcggacccccg

SEQ ID NO: 4879 - RNA, 19 nt, Artificial Sequence
  Description of Artificial Sequence: Synthetic oligonucleotide
cccaagauagcggaccccc

SEQ ID NO: 4880 - RNA, 19 nt, Artificial Sequence
  Description of Artificial Sequence: Synthetic oligonucleotide
ccccaagauagcggacccc

SEQ ID NO: 4881 - RNA, 19 nt, Artificial Sequence
  Description of Artificial Sequence: Synthetic oligonucleotide
gccccaagauagcggaccc

SEQ ID NO: 4882 - RNA, 19 nt, Artificial Sequence
  Description of Artificial Sequence: Synthetic oligonucleotide
agccccaagauagcggacc

SEQ ID NO: 4883 - RNA, 19 nt, Artificial Sequence
  Description of Artificial Sequence: Synthetic oligonucleotide
cagccccaagauagcggac

SEQ ID NO: 4884 - RNA, 19 nt, Artificial Sequence
  Description of Artificial Sequence: Synthetic oligonucleotide
acagccccaagauagcgga

SEQ ID NO: 4885 - RNA, 19 nt, Artificial Sequence
  Description of Artificial Sequence: Synthetic oligonucleotide
gacagccccaagauagcgg

SEQ ID NO: 4886 - RNA, 19 nt, Artificial Sequence
  Description of Artificial Sequence: Synthetic oligonucleotide
cgacagccccaagauagcg

SEQ ID NO: 4887 - RNA, 19 nt, Artificial Sequence
  Description of Artificial Sequence: Synthetic oligonucleotide
ccgacagccccaagauagc

SEQ ID NO: 4888 - RNA, 19 nt, Artificial Sequence
  Description of Artificial Sequence: Synthetic oligonucleotide
cccgacagccccaagauag

SEQ ID NO: 4889 - RNA, 19 nt, Artificial Sequence
  Description of Artificial Sequence: Synthetic oligonucleotide
ucccgacagccccaagaua

SEQ ID NO: 4890 - RNA, 19 nt, Artificial Sequence
  Description of Artificial Sequence: Synthetic oligonucleotide
gucccgacagccccaagau

SEQ ID NO: 4891 - RNA, 19 nt, Artificial Sequence
  Description of Artificial Sequence: Synthetic oligonucleotide
ggucccgacagccccaaga

SEQ ID NO: 4892 - RNA, 19 nt, Artificial Sequence
  Description of Artificial Sequence: Synthetic oligonucleotide
cggucccgacagccccaag

SEQ ID NO: 4893 - RNA, 19 nt, Artificial Sequence
  Description of Artificial Sequence: Synthetic oligonucleotide
gcggucccgacagccccaa

SEQ ID NO: 4894 - RNA, 19 nt, Artificial Sequence
  Description of Artificial Sequence: Synthetic oligonucleotide
agcggucccgacagcccca

SEQ ID NO: 4895 - RNA, 19 nt, Artificial Sequence
  Description of Artificial Sequence: Synthetic oligonucleotide
cagcggucccgacagcccc

SEQ ID NO: 4896 - RNA, 19 nt, Artificial Sequence
  Description of Artificial Sequence: Synthetic oligonucleotide
gcagcggucccgacagccc

SEQ ID NO: 4897 - RNA, 19 nt, Artificial Sequence
  Description of Artificial Sequence: Synthetic oligonucleotide
agcagcggucccgacagcc

SEQ ID NO: 4898 - RNA, 19 nt, Artificial Sequence
  Description of Artificial Sequence: Synthetic oligonucleotide
aagcagcggucccgacagc

SEQ ID NO: 4899 - RNA, 19 nt, Artificial Sequence
  Description of Artificial Sequence: Synthetic oligonucleotide
uaagcagcggucccgacag

SEQ ID NO: 4900 - RNA, 19 nt, Artificial Sequence
  Description of Artificial Sequence: Synthetic oligonucleotide
uuaagcagcggucccgaca

SEQ ID NO: 4901 - RNA, 19 nt, Artificial Sequence
  Description of Artificial Sequence: Synthetic oligonucleotide
uuuaagcagcggucccgac

SEQ ID NO: 4902 - RNA, 19 nt, Artificial Sequence
  Description of Artificial Sequence: Synthetic oligonucleotide
auuuaagcagcggucccga

SEQ ID NO: 4903 - RNA, 19 nt, Artificial Sequence
  Description of Artificial Sequence: Synthetic oligonucleotide
aauuuaagcagcggucccg

SEQ ID NO: 4904 - RNA, 19 nt, Artificial Sequence
  Description of Artificial Sequence: Synthetic oligonucleotide
aaauuuaagcagcgguccc

SEQ ID NO: 4905 - RNA, 19 nt, Artificial Sequence
  Description of Artificial Sequence: Synthetic oligonucleotide
caaauuuaagcagcggucc

SEQ ID NO: 4906 - RNA, 19 nt, Artificial Sequence
  Description of Artificial Sequence: Synthetic oligonucleotide
ccaaauuuaagcagcgguc

SEQ ID NO: 4907 - RNA, 19 nt, Artificial Sequence
  Description of Artificial Sequence: Synthetic oligonucleotide
gccaaauuuaagcagcggu

SEQ ID NO: 4908 - RNA, 19 nt, Artificial Sequence
  Description of Artificial Sequence: Synthetic oligonucleotide
ggccaaauuuaagcagcgg

SEQ ID NO: 4909 - RNA, 19 nt, Artificial Sequence
  Description of Artificial Sequence: Synthetic oligonucleotide
gggccaaauuuaagcagcg

SEQ ID NO: 4910 - RNA, 19 nt, Artificial Sequence
  Description of Artificial Sequence: Synthetic oligonucleotide
ugggccaaauuuaagcagc

SEQ ID NO: 4911 - RNA, 19 nt, Artificial Sequence
  Description of Artificial Sequence: Synthetic oligonucleotide
cugggccaaauuuaagcag

SEQ ID NO: 4912 - RNA, 19 nt, Artificial Sequence
  Description of Artificial Sequence: Synthetic oligonucleotide
acugggccaaauuuaagca

SEQ ID NO: 4913 - RNA, 19 nt, Artificial Sequence
  Description of Artificial Sequence: Synthetic oligonucleotide
gacugggccaaauuuaagc

SEQ ID NO: 4914 - RNA, 19 nt, Artificial Sequence
  Description of Artificial Sequence: Synthetic oligonucleotide
ggacugggccaaauuuaag

SEQ ID NO: 4915 - RNA, 19 nt, Artificial Sequence
  Description of Artificial Sequence: Synthetic oligonucleotide
uggacugggccaaauuuaa

SEQ ID NO: 4916 - RNA, 19 nt, Artificial Sequence
  Description of Artificial Sequence: Synthetic oligonucleotide
cuggacugggccaaauuua

SEQ ID NO: 4917 - RNA, 19 nt, Artificial Sequence
  Description of Artificial Sequence: Synthetic oligonucleotide
ucuggacugggccaaauuu

SEQ ID NO: 4918 - RNA, 19 nt, Artificial Sequence
  Description of Artificial Sequence: Synthetic oligonucleotide
gucuggacugggccaaauu

SEQ ID NO: 4919 - RNA, 19 nt, Artificial Sequence
  Description of Artificial Sequence: Synthetic oligonucleotide
ggucuggacugggccaaau

SEQ ID NO: 4920 - RNA, 19 nt, Artificial Sequence
  Description of Artificial Sequence: Synthetic oligonucleotide
aggucuggacugggccaaa

SEQ ID NO: 4921 - RNA, 19 nt, Artificial Sequence
  Description of Artificial Sequence: Synthetic oligonucleotide
gaggucuggacugggccaa

SEQ ID NO: 4922 - RNA, 19 nt, Artificial Sequence
  Description of Artificial Sequence: Synthetic oligonucleotide
cgaggucuggacugggcca

SEQ ID NO: 4923 - RNA, 19 nt, Artificial Sequence
  Description of Artificial Sequence: Synthetic oligonucleotide
ucgaggucuggacugggcc

SEQ ID NO: 4924 - RNA, 19 nt, Artificial Sequence
  Description of Artificial Sequence: Synthetic oligonucleotide
cucgaggucuggacugggc

SEQ ID NO: 4925 - RNA, 19 nt, Artificial Sequence
  Description of Artificial Sequence: Synthetic oligonucleotide
acucgaggucuggacuggg

SEQ ID NO: 4926 - RNA, 19 nt, Artificial Sequence
  Description of Artificial Sequence: Synthetic oligonucleotide
gacucgaggucuggacugg

SEQ ID NO: 4927 - RNA, 19 nt, Artificial Sequence
  Description of Artificial Sequence: Synthetic oligonucleotide
cgacucgaggucuggacug

SEQ ID NO: 4928 - RNA, 19 nt, Artificial Sequence
  Description of Artificial Sequence: Synthetic oligonucleotide
ccgacucgaggucuggacu

SEQ ID NO: 4929 - RNA, 19 nt, Artificial Sequence
  Description of Artificial Sequence: Synthetic oligonucleotide
cccgacucgaggucuggac

SEQ ID NO: 4930 - RNA, 19 nt, Artificial Sequence
  Description of Artificial Sequence: Synthetic oligonucleotide
gcccgacucgaggucugga

SEQ ID NO: 4931 - RNA, 19 nt, Artificial Sequence
  Description of Artificial Sequence: Synthetic oligonucleotide
ggcccgacucgaggucugg

SEQ ID NO: 4932 - RNA, 19 nt, Artificial Sequence
  Description of Artificial Sequence: Synthetic oligonucleotide
gggcccgacucgaggucug

SEQ ID NO: 4933 - RNA, 19 nt, Artificial Sequence
  Description of Artificial Sequence: Synthetic oligonucleotide
ggggcccgacucgaggucu

SEQ ID NO: 4934 - RNA, 19 nt, Artificial Sequence
  Description of Artificial Sequence: Synthetic oligonucleotide
gggggcccgacucgagguc

SEQ ID NO: 4935 - RNA, 19 nt, Artificial Sequence
  Description of Artificial Sequence: Synthetic oligonucleotide
ugggggcccgacucgaggu

SEQ ID NO: 4936 - RNA, 19 nt, Artificial Sequence
  Description of Artificial Sequence: Synthetic oligonucleotide
cugggggcccgacucgagg

SEQ ID NO: 4937 - RNA, 19 nt, Artificial Sequence
  Description of Artificial Sequence: Synthetic oligonucleotide
gcugggggcccgacucgag

SEQ ID NO: 4938 - RNA, 19 nt, Artificial Sequence
  Description of Artificial Sequence: Synthetic oligonucleotide
ggcugggggcccgacucga

SEQ ID NO: 4939 - RNA, 19 nt, Artificial Sequence
  Description of Artificial Sequence: Synthetic oligonucleotide
uggcugggggcccgacucg

SEQ ID NO: 4940 - RNA, 19 nt, Artificial Sequence
  Description of Artificial Sequence: Synthetic oligonucleotide
cuggcugggggcccgacuc

SEQ ID NO: 4941 - RNA, 19 nt, Artificial Sequence
  Description of Artificial Sequence: Synthetic oligonucleotide
ccuggcugggggcccgacu

SEQ ID NO: 4942 - RNA, 19 nt, Artificial Sequence
  Description of Artificial Sequence: Synthetic oligonucleotide
gccuggcugggggcccgac

SEQ ID NO: 4943 - RNA, 19 nt, Artificial Sequence
  Description of Artificial Sequence: Synthetic oligonucleotide
ggccuggcugggggcccga

SEQ ID NO: 4944 - RNA, 19 nt, Artificial Sequence
  Description of Artificial Sequence: Synthetic oligonucleotide
gggccuggcugggggcccg

SEQ ID NO: 4945 - RNA, 19 nt, Artificial Sequence
  Description of Artificial Sequence: Synthetic oligonucleotide
ugggccuggcugggggccc

SEQ ID NO: 4946 - RNA, 19 nt, Artificial Sequence
  Description of Artificial Sequence: Synthetic oligonucleotide
gugggccuggcugggggcc

SEQ ID NO: 4947 - RNA, 19 nt, Artificial Sequence
  Description of Artificial Sequence: Synthetic oligonucleotide
cgugggccuggcugggggc

SEQ ID NO: 4948 - RNA, 19 nt, Artificial Sequence
  Description of Artificial Sequence: Synthetic oligonucleotide
gcgugggccuggcuggggg

SEQ ID NO: 4949 - RNA, 19 nt, Artificial Sequence
  Description of Artificial Sequence: Synthetic oligonucleotide
ggcgugggccuggcugggg

SEQ ID NO: 4950 - RNA, 19 nt, Artificial Sequence
  Description of Artificial Sequence: Synthetic oligonucleotide
gggcgugggccuggcuggg

SEQ ID NO: 4951 - RNA, 19 nt, Artificial Sequence
  Description of Artificial Sequence: Synthetic oligonucleotide
ugggcgugggccuggcugg

SEQ ID NO: 4952 - RNA, 19 nt, Artificial Sequence
  Description of Artificial Sequence: Synthetic oligonucleotide
cugggcgugggccuggcug

SEQ ID NO: 4953 - RNA, 19 nt, Artificial Sequence
  Description of Artificial Sequence: Synthetic oligonucleotide
ccugggcgugggccuggcu

SEQ ID NO: 4954 - RNA, 19 nt, Artificial Sequence
  Description of Artificial Sequence: Synthetic oligonucleotide
accugggcgugggccuggc

SEQ ID NO: 4955 - RNA, 19 nt, Artificial Sequence
  Description of Artificial Sequence: Synthetic oligonucleotide
gaccugggcgugggccugg

SEQ ID NO: 4956 - RNA, 19 nt, Artificial Sequence
  Description of Artificial Sequence: Synthetic oligonucleotide
ggaccugggcgugggccug

SEQ ID NO: 4957 - RNA, 19 nt, Artificial Sequence
  Description of Artificial Sequence: Synthetic oligonucleotide
uggaccugggcgugggccu

SEQ ID NO: 4958 - RNA, 19 nt, Artificial Sequence
  Description of Artificial Sequence: Synthetic oligonucleotide
cuggaccugggcgugggcc

SEQ ID NO: 4959 - RNA, 19 nt, Artificial Sequence
  Description of Artificial Sequence: Synthetic oligonucleotide
ccuggaccugggcgugggc

SEQ ID NO: 4960 - RNA, 19 nt, Artificial Sequence
  Description of Artificial Sequence: Synthetic oligonucleotide
gccuggaccugggcguggg

SEQ ID NO: 4961 - RNA, 19 nt, Artificial Sequence
  Description of Artificial Sequence: Synthetic oligonucleotide
ggccuggaccugggcgugg

SEQ ID NO: 4962 - RNA, 19 nt, Artificial Sequence
  Description of Artificial Sequence: Synthetic oligonucleotide
gggccuggaccugggcgug

SEQ ID NO: 4963 - RNA, 19 nt, Artificial Sequence
  Description of Artificial Sequence: Synthetic oligonucleotide
ugggccuggaccugggcgu

SEQ ID NO: 4964 - RNA, 19 nt, Artificial Sequence
  Description of Artificial Sequence: Synthetic oligonucleotide
cugggccuggaccugggcg

SEQ ID NO: 4965 - RNA, 19 nt, Artificial Sequence
  Description of Artificial Sequence: Synthetic oligonucleotide
ccugggccuggaccugggc

SEQ ID NO: 4966 - RNA, 19 nt, Artificial Sequence
  Description of Artificial Sequence: Synthetic oligonucleotide
gccugggccuggaccuggg

SEQ ID NO: 4967 - RNA, 19 nt, Artificial Sequence
  Description of Artificial Sequence: Synthetic oligonucleotide
ggccugggccuggaccugg

SEQ ID NO: 4968 - RNA, 19 nt, Artificial Sequence
  Description of Artificial Sequence: Synthetic oligonucleotide
cggccugggccuggaccug

SEQ ID NO: 4969 - RNA, 19 nt, Artificial Sequence
  Description of Artificial Sequence: Synthetic oligonucleotide
ccggccugggccuggaccu

SEQ ID NO: 4970 - RNA, 19 nt, Artificial Sequence
  Description of Artificial Sequence: Synthetic oligonucleotide
accggccugggccuggacc

SEQ ID NO: 4971 - RNA, 19 nt, Artificial Sequence
  Description of Artificial Sequence: Synthetic oligonucleotide
uaccggccugggccuggac

SEQ ID NO: 4972 - RNA, 19 nt, Artificial Sequence
  Description of Artificial Sequence: Synthetic oligonucleotide
cuaccggccugggccugga

SEQ ID NO: 4973 - RNA, 19 nt, Artificial Sequence
  Description of Artificial Sequence: Synthetic oligonucleotide
ccuaccggccugggccugg

SEQ ID NO: 4974 - RNA, 19 nt, Artificial Sequence
  Description of Artificial Sequence: Synthetic oligonucleotide
cccuaccggccugggccug

SEQ ID NO: 4975 - RNA, 19 nt, Artificial Sequence
  Description of Artificial Sequence: Synthetic oligonucleotide
ucccuaccggccugggccu

SEQ ID NO: 4976 - RNA, 19 nt, Artificial Sequence
  Description of Artificial Sequence: Synthetic oligonucleotide
aucccuaccggccugggcc

SEQ ID NO: 4977 - RNA, 19 nt, Artificial Sequence
  Description of Artificial Sequence: Synthetic oligonucleotide
gaucccuaccggccugggc

SEQ ID NO: 4978 - RNA, 19 nt, Artificial Sequence
  Description of Artificial Sequence: Synthetic oligonucleotide
ggaucccuaccggccuggg

SEQ ID NO: 4979 - RNA, 19 nt, Artificial Sequence
  Description of Artificial Sequence: Synthetic oligonucleotide
aggaucccuaccggccugg

SEQ ID NO: 4980 - RNA, 19 nt, Artificial Sequence
  Description of Artificial Sequence: Synthetic oligonucleotide
gaggaucccuaccggccug

SEQ ID NO: 4981 - RNA, 19 nt, Artificial Sequence
  Description of Artificial Sequence: Synthetic oligonucleotide
agaggaucccuaccggccu

SEQ ID NO: 4982 - RNA, 19 nt, Artificial Sequence
  Description of Artificial Sequence: Synthetic oligonucleotide
uagaggaucccuaccggcc

SEQ ID NO: 4983 - RNA, 19 nt, Artificial Sequence
  Description of Artificial Sequence: Synthetic oligonucleotide
cuagaggaucccuaccggc

SEQ ID NO: 4984 - RNA, 19 nt, Artificial Sequence
  Description of Artificial Sequence: Synthetic oligonucleotide
ccuagaggaucccuaccgg

SEQ ID NO: 4985 - RNA, 19 nt, Artificial Sequence
  Description of Artificial Sequence: Synthetic oligonucleotide
cccuagaggaucccuaccg

SEQ ID NO: 4986 - RNA, 19 nt, Artificial Sequence
  Description of Artificial Sequence: Synthetic oligonucleotide
acccuagaggaucccuacc

SEQ ID NO: 4987 - RNA, 19 nt, Artificial Sequence
  Description of Artificial Sequence: Synthetic oligonucleotide
gacccuagaggaucccuac

SEQ ID NO: 4988 - RNA, 19 nt, Artificial Sequence
  Description of Artificial Sequence: Synthetic oligonucleotide
ggacccuagaggaucccua

SEQ ID NO: 4989 - RNA, 19 nt, Artificial Sequence
  Description of Artificial Sequence: Synthetic oligonucleotide
gggacccuagaggaucccu

SEQ ID NO: 4990 - RNA, 19 nt, Artificial Sequence
  Description of Artificial Sequence: Synthetic oligonucleotide
ugggacccuagaggauccc

SEQ ID NO: 4991 - RNA, 19 nt, Artificial Sequence
  Description of Artificial Sequence: Synthetic oligonucleotide
cugggacccuagaggaucc

SEQ ID NO: 4992 - RNA, 19 nt, Artificial Sequence
  Description of Artificial Sequence: Synthetic oligonucleotide
gcugggacccuagaggauc

SEQ ID NO: 4993 - RNA, 19 nt, Artificial Sequence
  Description of Artificial Sequence: Synthetic oligonucleotide
agcugggacccuagaggau

SEQ ID NO: 4994 - RNA, 19 nt, Artificial Sequence
  Description of Artificial Sequence: Synthetic oligonucleotide
gagcugggacccuagagga

SEQ ID NO: 4995 - RNA, 19 nt, Artificial Sequence
  Description of Artificial Sequence: Synthetic oligonucleotide
cgagcugggacccuagagg

SEQ ID NO: 4996 - RNA, 19 nt, Artificial Sequence
  Description of Artificial Sequence: Synthetic oligonucleotide
gcgagcugggacccuagag

SEQ ID NO: 4997 - RNA, 19 nt, Artificial Sequence
  Description of Artificial Sequence: Synthetic oligonucleotide
ggcgagcugggacccuaga

SEQ ID NO: 4998 - RNA, 19 nt, Artificial Sequence
  Description of Artificial Sequence: Synthetic oligonucleotide
aggcgagcugggacccuag

SEQ ID NO: 4999 - RNA, 19 nt, Artificial Sequence
  Description of Artificial Sequence: Synthetic oligonucleotide
gaggcgagcugggacccua

SEQ ID NO: 5000 - RNA, 19 nt, Artificial Sequence
  Description of Artificial Sequence: Synthetic oligonucleotide
cgaggcgagcugggacccu

SEQ ID NO: 5001 - RNA, 19 nt, Artificial Sequence
  Description of Artificial Sequence: Synthetic oligonucleotide
ucgaggcgagcugggaccc

SEQ ID NO: 5002 - RNA, 19 nt, Artificial Sequence
  Description of Artificial Sequence: Synthetic oligonucleotide
aucgaggcgagcugggacc

SEQ ID NO: 5003 - RNA, 19 nt, Artificial Sequence
  Description of Artificial Sequence: Synthetic oligonucleotide
caucgaggcgagcugggac

SEQ ID NO: 5004 - RNA, 19 nt, Artificial Sequence
  Description of Artificial Sequence: Synthetic oligonucleotide
ccaucgaggcgagcuggga

SEQ ID NO: 5005 - RNA, 19 nt, Artificial Sequence
  Description of Artificial Sequence: Synthetic oligonucleotide
uccaucgaggcgagcuggg

SEQ ID NO: 5006 - RNA, 19 nt, Artificial Sequence
  Description of Artificial Sequence: Synthetic oligonucleotide
cuccaucgaggcgagcugg

SEQ ID NO: 5007 - RNA, 19 nt, Artificial Sequence
  Description of Artificial Sequence: Synthetic oligonucleotide
gcuccaucgaggcgagcug

SEQ ID NO: 5008 - RNA, 19 nt, Artificial Sequence
  Description of Artificial Sequence: Synthetic oligonucleotide
agcuccaucgaggcgagcu

SEQ ID NO: 5009 - RNA, 19 nt, Artificial Sequence
  Description of Artificial Sequence: Synthetic oligonucleotide
gagcuccaucgaggcgagc

SEQ ID NO: 5010 - RNA, 19 nt, Artificial Sequence
  Description of Artificial Sequence: Synthetic oligonucleotide
ggagcuccaucgaggcgag

SEQ ID NO: 5011 - RNA, 19 nt, Artificial Sequence
  Description of Artificial Sequence: Synthetic oligonucleotide
aggagcuccaucgaggcga

SEQ ID NO: 5012 - RNA, 19 nt, Artificial Sequence
  Description of Artificial Sequence: Synthetic oligonucleotide
gaggagcuccaucgaggcg

SEQ ID NO: 5013 - RNA, 19 nt, Artificial Sequence
  Description of Artificial Sequence: Synthetic oligonucleotide
ggaggagcuccaucgaggc

SEQ ID NO: 5014 - RNA, 19 nt, Artificial Sequence
  Description of Artificial Sequence: Synthetic oligonucleotide
gggaggagcuccaucgagg

SEQ ID NO: 5015 - RNA, 19 nt, Artificial Sequence
  Description of Artificial Sequence: Synthetic oligonucleotide
cgggaggagcuccaucgag

SEQ ID NO: 5016 - RNA, 19 nt, Artificial Sequence
  Description of Artificial Sequence: Synthetic oligonucleotide
gcgggaggagcuccaucga

SEQ ID NO: 5017 - RNA, 19 nt, Artificial Sequence
  Description of Artificial Sequence: Synthetic oligonucleotide
ggcgggaggagcuccaucg

SEQ ID NO: 5018 - RNA, 19 nt, Artificial Sequence
  Description of Artificial Sequence: Synthetic oligonucleotide
cggcgggaggagcuccauc

SEQ ID NO: 5019 - RNA, 19 nt, Artificial Sequence
  Description of Artificial Sequence: Synthetic oligonucleotide
gcggcgggaggagcuccau

SEQ ID NO: 5020 - RNA, 19 nt, Artificial Sequence
  Description of Artificial Sequence: Synthetic oligonucleotide
agcggcgggaggagcucca

SEQ ID NO: 5021 - RNA, 19 nt, Artificial Sequence
  Description of Artificial Sequence: Synthetic oligonucleotide
cagcggcgggaggagcucc

SEQ ID NO: 5022 - RNA, 19 nt, Artificial Sequence
  Description of Artificial Sequence: Synthetic oligonucleotide
gcagcggcgggaggagcuc

SEQ ID NO: 5023 - RNA, 19 nt, Artificial Sequence
  Description of Artificial Sequence: Synthetic oligonucleotide
ggcagcggcgggaggagcu

SEQ ID NO: 5024 - RNA, 19 nt, Artificial Sequence
  Description of Artificial Sequence: Synthetic oligonucleotide
aggcagcggcgggaggagc

SEQ ID NO: 5025 - RNA, 19 nt, Artificial Sequence
  Description of Artificial Sequence: Synthetic oligonucleotide
gaggcagcggcgggaggag

SEQ ID NO: 5026 - RNA, 19 nt, Artificial Sequence
  Description of Artificial Sequence: Synthetic oligonucleotide
ugaggcagcggcgggagga

SEQ ID NO: 5027 - RNA, 19 nt, Artificial Sequence
  Description of Artificial Sequence: Synthetic oligonucleotide
cugaggcagcggcgggagg

SEQ ID NO: 5028 - RNA, 19 nt, Artificial Sequence
  Description of Artificial Sequence: Synthetic oligonucleotide
acugaggcagcggcgggag

SEQ ID NO: 5029 - RNA, 19 nt, Artificial Sequence
  Description of Artificial Sequence: Synthetic oligonucleotide
gacugaggcagcggcggga

SEQ ID NO: 5030 - RNA, 19 nt, Artificial Sequence
  Description of Artificial Sequence: Synthetic oligonucleotide
ggacugaggcagcggcggg

SEQ ID NO: 5031 - RNA, 19 nt, Artificial Sequence
  Description of Artificial Sequence: Synthetic oligonucleotide
aggacugaggcagcggcgg

SEQ ID NO: 5032 - RNA, 19 nt, Artificial Sequence
  Description of Artificial Sequence: Synthetic oligonucleotide
aaggacugaggcagcggcg

SEQ ID NO: 5033 - RNA, 19 nt, Artificial Sequence
  Description of Artificial Sequence: Synthetic oligonucleotide
gaaggacugaggcagcggc

SEQ ID NO: 5034 - RNA, 19 nt, Artificial Sequence
  Description of Artificial Sequence: Synthetic oligonucleotide
ggaaggacugaggcagcgg

SEQ ID NO: 5035 - RNA, 19 nt, Artificial Sequence
  Description of Artificial Sequence: Synthetic oligonucleotide
aggaaggacugaggcagcg

SEQ ID NO: 5036 - RNA, 19 nt, Artificial Sequence
  Description of Artificial Sequence: Synthetic oligonucleotide
caggaaggacugaggcagc

SEQ ID NO: 5037 - RNA, 19 nt, Artificial Sequence
  Description of Artificial Sequence: Synthetic oligonucleotide
acaggaaggacugaggcag

SEQ ID NO: 5038 - RNA, 19 nt, Artificial Sequence
  Description of Artificial Sequence: Synthetic oligonucleotide
aacaggaaggacugaggca

SEQ ID NO: 5039 - RNA, 19 nt, Artificial Sequence
  Description of Artificial Sequence: Synthetic oligonucleotide
caacaggaaggacugaggc

SEQ ID NO: 5040 - RNA, 19 nt, Artificial Sequence
  Description of Artificial Sequence: Synthetic oligonucleotide
gcaacaggaaggacugagg

SEQ ID NO: 5041 - RNA, 19 nt, Artificial Sequence
  Description of Artificial Sequence: Synthetic oligonucleotide
agcaacaggaaggacugag

SEQ ID NO: 5042 - RNA, 19 nt, Artificial Sequence
  Description of Artificial Sequence: Synthetic oligonucleotide
cagcaacaggaaggacuga

SEQ ID NO: 5043 - RNA, 19 nt, Artificial Sequence
  Description of Artificial Sequence: Synthetic oligonucleotide
gcagcaacaggaaggacug

SEQ ID NO: 5044 - RNA, 19 nt, Artificial Sequence
  Description of Artificial Sequence: Synthetic oligonucleotide
agcagcaacaggaaggacu

SEQ ID NO: 5045 - RNA, 19 nt, Artificial Sequence
  Description of Artificial Sequence: Synthetic oligonucleotide
cagcagcaacaggaaggac

SEQ ID NO: 5046 - RNA, 19 nt, Artificial Sequence
  Description of Artificial Sequence: Synthetic oligonucleotide
gcagcagcaacaggaagga

SEQ ID NO: 5047 - RNA, 19 nt, Artificial Sequence
  Description of Artificial Sequence: Synthetic oligonucleotide
agcagcagcaacaggaagg

SEQ ID NO: 5048 - RNA, 19 nt, Artificial Sequence
  Description of Artificial Sequence: Synthetic oligonucleotide
cagcagcagcaacaggaag

SEQ ID NO: 5049 - RNA, 19 nt, Artificial Sequence
  Description of Artificial Sequence: Synthetic oligonucleotide
acagcagcagcaacaggaa

SEQ ID NO: 5050 - RNA, 19 nt, Artificial Sequence
  Description of Artificial Sequence: Synthetic oligonucleotide
aacagcagcagcaacagga

SEQ ID NO: 5051 - RNA, 19 nt, Artificial Sequence
  Description of Artificial Sequence: Synthetic oligonucleotide
caacagcagcagcaacagg

SEQ ID NO: 5052 - RNA, 19 nt, Artificial Sequence
  Description of Artificial Sequence: Synthetic oligonucleotide
gcaacagcagcagcaacag

SEQ ID NO: 5053 - RNA, 19 nt, Artificial Sequence
  Description of Artificial Sequence: Synthetic oligonucleotide
ggcaacagcagcagcaaca

SEQ ID NO: 5054 - RNA, 19 nt, Artificial Sequence
  Description of Artificial Sequence: Synthetic oligonucleotide
aggcaacagcagcagcaac

SEQ ID NO: 5055 - RNA, 19 nt, Artificial Sequence
  Description of Artificial Sequence: Synthetic oligonucleotide
caggcaacagcagcagcaa

SEQ ID NO: 5056 - RNA, 19 nt, Artificial Sequence
  Description of Artificial Sequence: Synthetic oligonucleotide
gcaggcaacagcagcagca

SEQ ID NO: 5057 - RNA, 19 nt, Artificial Sequence
  Description of Artificial Sequence: Synthetic oligonucleotide
ggcaggcaacagcagcagc

SEQ ID NO: 5058 - RNA, 19 nt, Artificial Sequence
  Description of Artificial Sequence: Synthetic oligonucleotide
uggcaggcaacagcagcag

SEQ ID NO: 5059 - RNA, 19 nt, Artificial Sequence
  Description of Artificial Sequence: Synthetic oligonucleotide
uuggcaggcaacagcagca

SEQ ID NO: 5060 - RNA, 19 nt, Artificial Sequence
  Description of Artificial Sequence: Synthetic oligonucleotide
cuuggcaggcaacagcagc

SEQ ID NO: 5061 - RNA, 19 nt, Artificial Sequence
  Description of Artificial Sequence: Synthetic oligonucleotide
gcuuggcaggcaacagcag

SEQ ID NO: 5062 - RNA, 19 nt, Artificial Sequence
  Description of Artificial Sequence: Synthetic oligonucleotide
ggcuuggcaggcaacagca

SEQ ID NO: 5063 - RNA, 19 nt, Artificial Sequence
  Description of Artificial Sequence: Synthetic oligonucleotide
gggcuuggcaggcaacagc

SEQ ID NO: 5064 - RNA, 19 nt, Artificial Sequence
  Description of Artificial Sequence: Synthetic oligonucleotide
cgggcuuggcaggcaacag

SEQ ID NO: 5065 - RNA, 19 nt, Artificial Sequence
  Description of Artificial Sequence: Synthetic oligonucleotide
gcgggcuuggcaggcaaca

SEQ ID NO: 5066 - RNA, 19 nt, Artificial Sequence
  Description of Artificial Sequence: Synthetic oligonucleotide
cgcgggcuuggcaggcaac

SEQ ID NO: 5067 - RNA, 19 nt, Artificial Sequence
  Description of Artificial Sequence: Synthetic oligonucleotide
ccgcgggcuuggcaggcaa

SEQ ID NO: 5068 - RNA, 19 nt, Artificial Sequence
  Description of Artificial Sequence: Synthetic oligonucleotide
gccgcgggcuuggcaggca

SEQ ID NO: 5069 - RNA, 19 nt, Artificial Sequence
  Description of Artificial Sequence: Synthetic oligonucleotide
cgccgcgggcuuggcaggc

SEQ ID NO: 5070 - RNA, 19 nt, Artificial Sequence
  Description of Artificial Sequence: Synthetic oligonucleotide
ccgccgcgggcuuggcagg

SEQ ID NO: 5071 - RNA, 19 nt, Artificial Sequence
  Description of Artificial Sequence: Synthetic oligonucleotide
cccgccgcgggcuuggcag

SEQ ID NO: 5072 - RNA, 19 nt, Artificial Sequence
  Description of Artificial Sequence: Synthetic oligonucleotide
gcccgccgcgggcuuggca

SEQ ID NO: 5073 - RNA, 19 nt, Artificial Sequence
  Description of Artificial Sequence: Synthetic oligonucleotide
cgcccgccgcgggcuuggc

SEQ ID NO: 5074 - RNA, 19 nt, Artificial Sequence
  Description of Artificial Sequence: Synthetic oligonucleotide
ucgcccgccgcgggcuugg

SEQ ID NO: 5075 - RNA, 19 nt, Artificial Sequence
  Description of Artificial Sequence: Synthetic oligonucleotide
cucgcccgccgcgggcuug

SEQ ID NO: 5076 - RNA, 19 nt, Artificial Sequence
  Description of Artificial Sequence: Synthetic oligonucleotide
ccucgcccgccgcgggcuu

SEQ ID NO: 5077 - RNA, 19 nt, Artificial Sequence
  Description of Artificial Sequence: Synthetic oligonucleotide
uccucgcccgccgcgggcu

SEQ ID NO: 5078 - RNA, 19 nt, Artificial Sequence
  Description of Artificial Sequence: Synthetic oligonucleotide
guccucgcccgccgcgggc

SEQ ID NO: 5079 - RNA, 19 nt, Artificial Sequence
  Description of Artificial Sequence: Synthetic oligonucleotide
aguccucgcccgccgcggg

SEQ ID NO: 5080 - RNA, 19 nt, Artificial Sequence
  Description of Artificial Sequence: Synthetic oligonucleotide
caguccucgcccgccgcgg

SEQ ID NO: 5081 - RNA, 19 nt, Artificial Sequence
  Description of Artificial Sequence: Synthetic oligonucleotide
ccaguccucgcccgccgcg

SEQ ID NO: 5082 - RNA, 19 nt, Artificial Sequence
  Description of Artificial Sequence: Synthetic oligonucleotide
gccaguccucgcccgccgc

SEQ ID NO: 5083 - RNA, 19 nt, Artificial Sequence
  Description of Artificial Sequence: Synthetic oligonucleotide
ugccaguccucgcccgccg

SEQ ID NO: 5084 - RNA, 19 nt, Artificial Sequence
  Description of Artificial Sequence: Synthetic oligonucleotide
cugccaguccucgcccgcc

SEQ ID NO: 5085 - RNA, 19 nt, Artificial Sequence
  Description of Artificial Sequence: Synthetic oligonucleotide
acugccaguccucgcccgc

SEQ ID NO: 5086 - RNA, 19 nt, Artificial Sequence
  Description of Artificial Sequence: Synthetic oligonucleotide
cacugccaguccucgcccg

SEQ ID NO: 5087 - RNA, 19 nt, Artificial Sequence
  Description of Artificial Sequence: Synthetic oligonucleotide
gcacugccaguccucgccc

SEQ ID NO: 5088 - RNA, 19 nt, Artificial Sequence
  Description of Artificial Sequence: Synthetic oligonucleotide
ggcacugccaguccucgcc

SEQ ID NO: 5089 - RNA, 19 nt, Artificial Sequence
  Description of Artificial Sequence: Synthetic oligonucleotide
gggcacugccaguccucgc

SEQ ID NO: 5090 - RNA, 19 nt, Artificial Sequence
  Description of Artificial Sequence: Synthetic oligonucleotide
cgggcacugccaguccucg

SEQ ID NO: 5091 - RNA, 19 nt, Artificial Sequence
  Description of Artificial Sequence: Synthetic oligonucleotide
gcgggcacugccaguccuc

SEQ ID NO: 5092 - RNA, 19 nt, Artificial Sequence
  Description of Artificial Sequence: Synthetic oligonucleotide
cgcgggcacugccaguccu

SEQ ID NO: 5093 - RNA, 19 nt, Artificial Sequence
  Description of Artificial Sequence: Synthetic oligonucleotide
gcgcgggcacugccagucc

SEQ ID NO: 5094 - RNA, 19 nt, Artificial Sequence
  Description of Artificial Sequence: Synthetic oligonucleotide
ugcgcgggcacugccaguc

SEQ ID NO: 5095 - RNA, 19 nt, Artificial Sequence
  Description of Artificial Sequence: Synthetic oligonucleotide
gugcgcgggcacugccagu

SEQ ID NO: 5096 - RNA, 19 nt, Artificial Sequence
  Description of Artificial Sequence: Synthetic oligonucleotide
ggugcgcgggcacugccag

SEQ ID NO: 5097 - RNA, 19 nt, Artificial Sequence
  Description of Artificial Sequence: Synthetic oligonucleotide
gggugcgcgggcacugcca

SEQ ID NO: 5098 - RNA, 19 nt, Artificial Sequence
  Description of Artificial Sequence: Synthetic oligonucleotide
ggggugcgcgggcacugcc

SEQ ID NO: 5099 - RNA, 19 nt, Artificial Sequence
  Description of Artificial Sequence: Synthetic oligonucleotide
gggggugcgcgggcacugc

SEQ ID NO: 5100 - RNA, 19 nt, Artificial Sequence
  Description of Artificial Sequence: Synthetic oligonucleotide
agggggugcgcgggcacug

SEQ ID NO: 5101 - RNA, 19 nt, Artificial Sequence
  Description of Artificial Sequence: Synthetic oligonucleotide
uagggggugcgcgggcacu

SEQ ID NO: 5102 - RNA, 19 nt, Artificial Sequence
  Description of Artificial Sequence: Synthetic oligonucleotide
guagggggugcgcgggcac

SEQ ID NO: 5103 - RNA, 19 nt, Artificial Sequence
  Description of Artificial Sequence: Synthetic oligonucleotide
cguagggggugcgcgggca

SEQ ID NO: 5104 - RNA, 19 nt, Artificial Sequence
  Description of Artificial Sequence: Synthetic oligonucleotide
gcguagggggugcgcgggc

SEQ ID NO: 5105 - RNA, 19 nt, Artificial Sequence
  Description of Artificial Sequence: Synthetic oligonucleotide
cgcguagggggugcgcggg

SEQ ID NO: 5106 - RNA, 19 nt, Artificial Sequence
  Description of Artificial Sequence: Synthetic oligonucleotide
ccgcguagggggugcgcgg

SEQ ID NO: 5107 - RNA, 19 nt, Artificial Sequence
  Description of Artificial Sequence: Synthetic oligonucleotide
gccgcguagggggugcgcg

SEQ ID NO: 5108 - RNA, 19 nt, Artificial Sequence
  Description of Artificial Sequence: Synthetic oligonucleotide
ggccgcguagggggugcgc

SEQ ID NO: 5109 - RNA, 19 nt, Artificial Sequence
  Description of Artificial Sequence: Synthetic oligonucleotide
aggccgcguagggggugcg

SEQ ID NO: 5110 - RNA, 19 nt, Artificial Sequence
  Description of Artificial Sequence: Synthetic oligonucleotide
gaggccgcguagggggugc

SEQ ID NO: 5111 - RNA, 19 nt, Artificial Sequence
  Description of Artificial Sequence: Synthetic oligonucleotide
agaggccgcguagggggug

SEQ ID NO: 5112 - RNA, 19 nt, Artificial Sequence
  Description of Artificial Sequence: Synthetic oligonucleotide
gagaggccgcguagggggu

SEQ ID NO: 5113 - RNA, 19 nt, Artificial Sequence
  Description of Artificial Sequence: Synthetic oligonucleotide
cgagaggccgcguaggggg

SEQ ID NO: 5114 - RNA, 19 nt, Artificial Sequence
  Description of Artificial Sequence: Synthetic oligonucleotide
gcgagaggccgcguagggg

SEQ ID NO: 5115 - RNA, 19 nt, Artificial Sequence
  Description of Artificial Sequence: Synthetic oligonucleotide
cgcgagaggccgcguaggg

SEQ ID NO: 5116 - RNA, 19 nt, Artificial Sequence
  Description of Artificial Sequence: Synthetic oligonucleotide
ucgcgagaggccgcguagg

SEQ ID NO: 5117 - RNA, 19 nt, Artificial Sequence
  Description of Artificial Sequence: Synthetic oligonucleotide
gucgcgagaggccgcguag

SEQ ID NO: 5118 - RNA, 19 nt, Artificial Sequence
  Description of Artificial Sequence: Synthetic oligonucleotide
agucgcgagaggccgcgua

SEQ ID NO: 5119 - RNA, 19 nt, Artificial Sequence
  Description of Artificial Sequence: Synthetic oligonucleotide
aagucgcgagaggccgcgu

SEQ ID NO: 5120 - RNA, 19 nt, Artificial Sequence
  Description of Artificial Sequence: Synthetic oligonucleotide
aaagucgcgagaggccgcg

SEQ ID NO: 5121 - RNA, 19 nt, Artificial Sequence
  Description of Artificial Sequence: Synthetic oligonucleotide
caaagucgcgagaggccgc

SEQ ID NO: 5122 - RNA, 19 nt, Artificial Sequence
  Description of Artificial Sequence: Synthetic oligonucleotide
ucaaagucgcgagaggccg

SEQ ID NO: 5123 - RNA, 19 nt, Artificial Sequence
  Description of Artificial Sequence: Synthetic oligonucleotide
gucaaagucgcgagaggcc

SEQ ID NO: 5124 - RNA, 19 nt, Artificial Sequence
  Description of Artificial Sequence: Synthetic oligonucleotide
cgucaaagucgcgagaggc

SEQ ID NO: 5125 - RNA, 19 nt, Artificial Sequence
  Description of Artificial Sequence: Synthetic oligonucleotide
acgucaaagucgcgagagg

SEQ ID NO: 5126 - RNA, 19 nt, Artificial Sequence
  Description of Artificial Sequence: Synthetic oligonucleotide
cacgucaaagucgcgagag

SEQ ID NO: 5127 - RNA, 19 nt, Artificial Sequence
  Description of Artificial Sequence: Synthetic oligonucleotide
ucacgucaaagucgcgaga

SEQ ID NO: 5128 - RNA, 19 nt, Artificial Sequence
  Description of Artificial Sequence: Synthetic oligonucleotide
uucacgucaaagucgcgag

SEQ ID NO: 5129 - RNA, 19 nt, Artificial Sequence
  Description of Artificial Sequence: Synthetic oligonucleotide
cuucacgucaaagucgcga

SEQ ID NO: 5130 - RNA, 19 nt, Artificial Sequence
  Description of Artificial Sequence: Synthetic oligonucleotide
acuucacgucaaagucgcg

SEQ ID NO: 5131 - RNA, 19 nt, Artificial Sequence
  Description of Artificial Sequence: Synthetic oligonucleotide
uacuucacgucaaagucgc

SEQ ID NO: 5132 - RNA, 19 nt, Artificial Sequence
  Description of Artificial Sequence: Synthetic oligonucleotide
guacuucacgucaaagucg

SEQ ID NO: 5133 - RNA, 19 nt, Artificial Sequence
  Description of Artificial Sequence: Synthetic oligonucleotide
cguacuucacgucaaaguc

SEQ ID NO: 5134 - RNA, 19 nt, Artificial Sequence
  Description of Artificial Sequence: Synthetic oligonucleotide
acguacuucacgucaaagu

SEQ ID NO: 5135 - RNA, 19 nt, Artificial Sequence
  Description of Artificial Sequence: Synthetic oligonucleotide
cacguacuucacgucaaag

SEQ ID NO: 5136 - RNA, 19 nt, Artificial Sequence
  Description of Artificial Sequence: Synthetic oligonucleotide
ccacguacuucacgucaaa

SEQ ID NO: 5137 - RNA, 19 nt, Artificial Sequence
  Description of Artificial Sequence: Synthetic oligonucleotide
accacguacuucacgucaa

SEQ ID NO: 5138 - RNA, 19 nt, Artificial Sequence
  Description of Artificial Sequence: Synthetic oligonucleotide
caccacguacuucacguca

SEQ ID NO: 5139 - RNA, 19 nt, Artificial Sequence
  Description of Artificial Sequence: Synthetic oligonucleotide
gcaccacguacuucacguc

SEQ ID NO: 5140 - RNA, 19 nt, Artificial Sequence
  Description of Artificial Sequence: Synthetic oligonucleotide
ggcaccacguacuucacgu

SEQ ID NO: 5141 - RNA, 19 nt, Artificial Sequence
  Description of Artificial Sequence: Synthetic oligonucleotide
gggcaccacguacuucacg

SEQ ID NO: 5142 - RNA, 19 nt, Artificial Sequence
  Description of Artificial Sequence: Synthetic oligonucleotide
ugggcaccacguacuucac

SEQ ID NO: 5143 - RNA, 19 nt, Artificial Sequence
  Description of Artificial Sequence: Synthetic oligonucleotide
cugggcaccacguacuuca

SEQ ID NO: 5144 - RNA, 19 nt, Artificial Sequence
  Description of Artificial Sequence: Synthetic oligonucleotide
gcugggcaccacguacuuc

SEQ ID NO: 5145 - RNA, 19 nt, Artificial Sequence
  Description of Artificial Sequence: Synthetic oligonucleotide
agcugggcaccacguacuu

SEQ ID NO: 5146 - RNA, 19 nt, Artificial Sequence
  Description of Artificial Sequence: Synthetic oligonucleotide
aagcugggcaccacguacu

SEQ ID NO: 5147 - RNA, 19 nt, Artificial Sequence
  Description of Artificial Sequence: Synthetic oligonucleotide
gaagcugggcaccacguac

SEQ ID NO: 5148 - RNA, 19 nt, Artificial Sequence
  Description of Artificial Sequence: Synthetic oligonucleotide
agaagcugggcaccacgua

SEQ ID NO: 5149 - RNA, 19 nt, Artificial Sequence
  Description of Artificial Sequence: Synthetic oligonucleotide
gagaagcugggcaccacgu

SEQ ID NO: 5150 - RNA, 19 nt, Artificial Sequence
  Description of Artificial Sequence: Synthetic oligonucleotide
ggagaagcugggcaccacg

SEQ ID NO: 5151 - RNA, 19 nt, Artificial Sequence
  Description of Artificial Sequence: Synthetic oligonucleotide
cggagaagcugggcaccac

SEQ ID NO: 5152 - RNA, 19 nt, Artificial Sequence
  Description of Artificial Sequence: Synthetic oligonucleotide
gcggagaagcugggcacca

SEQ ID NO: 5153 - RNA, 19 nt, Artificial Sequence
  Description of Artificial Sequence: Synthetic oligonucleotide
ggcggagaagcugggcacc

SEQ ID NO: 5154 - RNA, 19 nt, Artificial Sequence
  Description of Artificial Sequence: Synthetic oligonucleotide
cggcggagaagcugggcac

SEQ ID NO: 5155 - RNA, 19 nt, Artificial Sequence
  Description of Artificial Sequence: Synthetic oligonucleotide
ccggcggagaagcugggca

SEQ ID NO: 5156 - RNA, 19 nt, Artificial Sequence
  Description of Artificial Sequence: Synthetic oligonucleotide
uccggcggagaagcugggc

SEQ ID NO: 5157 - RNA, 19 nt, Artificial Sequence
  Description of Artificial Sequence: Synthetic oligonucleotide
cuccggcggagaagcuggg

SEQ ID NO: 5158 - RNA, 19 nt, Artificial Sequence
  Description of Artificial Sequence: Synthetic oligonucleotide
ccuccggcggagaagcugg

SEQ ID NO: 5159 - RNA, 19 nt, Artificial Sequence
  Description of Artificial Sequence: Synthetic oligonucleotide
gccuccggcggagaagcug

SEQ ID NO: 5160 - RNA, 19 nt, Artificial Sequence
  Description of Artificial Sequence: Synthetic oligonucleotide
ggccuccggcggagaagcu

SEQ ID NO: 5161 - RNA, 19 nt, Artificial Sequence
  Description of Artificial Sequence: Synthetic oligonucleotide
aggccuccggcggagaagc

SEQ ID NO: 5162 - RNA, 19 nt, Artificial Sequence
  Description of Artificial Sequence: Synthetic oligonucleotide
caggccuccggcggagaag

SEQ ID NO: 5163 - RNA, 19 nt, Artificial Sequence
  Description of Artificial Sequence: Synthetic oligonucleotide
ccaggccuccggcggagaa

SEQ ID NO: 5164 - RNA, 19 nt, Artificial Sequence
  Description of Artificial Sequence: Synthetic oligonucleotide
accaggccuccggcggaga

SEQ ID NO: 5165 - RNA, 19 nt, Artificial Sequence
  Description of Artificial Sequence: Synthetic oligonucleotide
uaccaggccuccggcggag

SEQ ID NO: 5166 - RNA, 19 nt, Artificial Sequence
  Description of Artificial Sequence: Synthetic oligonucleotide
guaccaggccuccggcgga

SEQ ID NO: 5167 - RNA, 19 nt, Artificial Sequence
  Description of Artificial Sequence: Synthetic oligonucleotide
uguaccaggccuccggcgg

SEQ ID NO: 5168 - RNA, 19 nt, Artificial Sequence
  Description of Artificial Sequence: Synthetic oligonucleotide
cuguaccaggccuccggcg

SEQ ID NO: 5169 - RNA, 19 nt, Artificial Sequence
  Description of Artificial Sequence: Synthetic oligonucleotide
ccuguaccaggccuccggc

SEQ ID NO: 5170 - RNA, 19 nt, Artificial Sequence
  Description of Artificial Sequence: Synthetic oligonucleotide
gccuguaccaggccuccgg

SEQ ID NO: 5171 - RNA, 19 nt, Artificial Sequence
  Description of Artificial Sequence: Synthetic oligonucleotide
ggccuguaccaggccuccg

SEQ ID NO: 5172 - RNA, 19 nt, Artificial Sequence
  Description of Artificial Sequence: Synthetic oligonucleotide
uggccuguaccaggccucc

SEQ ID NO: 5173 - RNA, 19 nt, Artificial Sequence
  Description of Artificial Sequence: Synthetic oligonucleotide
auggccuguaccaggccuc

SEQ ID NO: 5174 - RNA, 19 nt, Artificial Sequence
  Description of Artificial Sequence: Synthetic oligonucleotide
cauggccuguaccaggccu

SEQ ID NO: 5175 - RNA, 19 nt, Artificial Sequence
  Description of Artificial Sequence: Synthetic oligonucleotide
ccauggccuguaccaggcc

SEQ ID NO: 5176 - RNA, 19 nt, Artificial Sequence
  Description of Artificial Sequence: Synthetic oligonucleotide
accauggccuguaccaggc

SEQ ID NO: 5177 - RNA, 19 nt, Artificial Sequence
  Description of Artificial Sequence: Synthetic oligonucleotide
caccauggccuguaccagg

SEQ ID NO: 5178 - RNA, 19 nt, Artificial Sequence
  Description of Artificial Sequence: Synthetic oligonucleotide
ucaccauggccuguaccag

SEQ ID NO: 5179 - RNA, 19 nt, Artificial Sequence
  Description of Artificial Sequence: Synthetic oligonucleotide
gucaccauggccuguacca

SEQ ID NO: 5180 - RNA, 19 nt, Artificial Sequence
  Description of Artificial Sequence: Synthetic oligonucleotide
ggucaccauggccuguacc

SEQ ID NO: 5181 - RNA, 19 nt, Artificial Sequence
  Description of Artificial Sequence: Synthetic oligonucleotide
aggucaccauggccuguac

SEQ ID NO: 5182 - RNA, 19 nt, Artificial Sequence
  Description of Artificial Sequence: Synthetic oligonucleotide
uaggucaccauggccugua

SEQ ID NO: 5183 - RNA, 19 nt, Artificial Sequence
  Description of Artificial Sequence: Synthetic oligonucleotide
guaggucaccauggccugu

SEQ ID NO: 5184 - RNA, 19 nt, Artificial Sequence
  Description of Artificial Sequence: Synthetic oligonucleotide
cguaggucaccauggccug

SEQ ID NO: 5185 - RNA, 19 nt, Artificial Sequence
  Description of Artificial Sequence: Synthetic oligonucleotide
ucguaggucaccauggccu

SEQ ID NO: 5186 - RNA, 19 nt, Artificial Sequence
  Description of Artificial Sequence: Synthetic oligonucleotide
cucguaggucaccauggcc

SEQ ID NO: 5187 - RNA, 19 nt, Artificial Sequence
  Description of Artificial Sequence: Synthetic oligonucleotide
ccucguaggucaccauggc

SEQ ID NO: 5188 - RNA, 19 nt, Artificial Sequence
  Description of Artificial Sequence: Synthetic oligonucleotide
cccucguaggucaccaugg

SEQ ID NO: 5189 - RNA, 19 nt, Artificial Sequence
  Description of Artificial Sequence: Synthetic oligonucleotide
gcccucguaggucaccaug

SEQ ID NO: 5190 - RNA, 19 nt, Artificial Sequence
  Description of Artificial Sequence: Synthetic oligonucleotide
cgcccucguaggucaccau

SEQ ID NO: 5191 - RNA, 19 nt, Artificial Sequence
  Description of Artificial Sequence: Synthetic oligonucleotide
ucgcccucguaggucacca

SEQ ID NO: 5192 - RNA, 19 nt, Artificial Sequence
  Description of Artificial Sequence: Synthetic oligonucleotide
gucgcccucguaggucacc

SEQ ID NO: 5193 - RNA, 19 nt, Artificial Sequence
  Description of Artificial Sequence: Synthetic oligonucleotide
ugucgcccucguaggucac

SEQ ID NO: 5194 - RNA, 19 nt, Artificial Sequence
  Description of Artificial Sequence: Synthetic oligonucleotide
cugucgcccucguagguca

SEQ ID NO: 5195 - RNA, 19 nt, Artificial Sequence
  Description of Artificial Sequence: Synthetic oligonucleotide
ucugucgcccucguagguc

SEQ ID NO: 5196 - RNA, 19 nt, Artificial Sequence
  Description of Artificial Sequence: Synthetic oligonucleotide
uucugucgcccucguaggu

SEQ ID NO: 5197 - RNA, 19 nt, Artificial Sequence
  Description of Artificial Sequence: Synthetic oligonucleotide
uuucugucgcccucguagg

SEQ ID NO: 5198 - RNA, 19 nt, Artificial Sequence
  Description of Artificial Sequence: Synthetic oligonucleotide
auuucugucgcccucguag

SEQ ID NO: 5199 - RNA, 19 nt, Artificial Sequence
  Description of Artificial Sequence: Synthetic oligonucleotide
cauuucugucgcccucgua

SEQ ID NO: 5200 - RNA, 19 nt, Artificial Sequence
  Description of Artificial Sequence: Synthetic oligonucleotide
ucauuucugucgcccucgu

SEQ ID NO: 5201 - RNA, 19 nt, Artificial Sequence
  Description of Artificial Sequence: Synthetic oligonucleotide
cucauuucugucgcccucg

SEQ ID NO: 5202 - RNA, 19 nt, Artificial Sequence
  Description of Artificial Sequence: Synthetic oligonucleotide
ucucauuucugucgcccuc

SEQ ID NO: 5203 - RNA, 19 nt, Artificial Sequence
  Description of Artificial Sequence: Synthetic oligonucleotide
cucucauuucugucgcccu

SEQ ID NO: 5204 - RNA, 19 nt, Artificial Sequence
  Description of Artificial Sequence: Synthetic oligonucleotide
acucucauuucugucgccc

SEQ ID NO: 5205 - RNA, 19 nt, Artificial Sequence
  Description of Artificial Sequence: Synthetic oligonucleotide
cacucucauuucugucgcc

SEQ ID NO: 5206 - RNA, 19 nt, Artificial Sequence
  Description of Artificial Sequence: Synthetic oligonucleotide
gcacucucauuucugucgc

SEQ ID NO: 5207 - RNA, 19 nt, Artificial Sequence
  Description of Artificial Sequence: Synthetic oligonucleotide
agcacucucauuucugucg

SEQ ID NO: 5208 - RNA, 19 nt, Artificial Sequence
  Description of Artificial Sequence: Synthetic oligonucleotide
cagcacucucauuucuguc

SEQ ID NO: 5209 - RNA, 19 nt, Artificial Sequence
  Description of Artificial Sequence: Synthetic oligonucleotide
acagcacucucauuucugu

SEQ ID NO: 5210 - RNA, 19 nt, Artificial Sequence
  Description of Artificial Sequence: Synthetic oligonucleotide
cacagcacucucauuucug

SEQ ID NO: 5211 - RNA, 19 nt, Artificial Sequence
  Description of Artificial Sequence: Synthetic oligonucleotide
acacagcacucucauuucu

SEQ ID NO: 5212 - RNA, 19 nt, Artificial Sequence
  Description of Artificial Sequence: Synthetic oligonucleotide
aacacagcacucucauuuc

SEQ ID NO: 5213 - RNA, 19 nt, Artificial Sequence
  Description of Artificial Sequence: Synthetic oligonucleotide
aaacacagcacucucauuu

SEQ ID NO: 5214 - RNA, 19 nt, Artificial Sequence
  Description of Artificial Sequence: Synthetic oligonucleotide
caaacacagcacucucauu

SEQ ID NO: 5215 - RNA, 19 nt, Artificial Sequence
  Description of Artificial Sequence: Synthetic oligonucleotide
acaaacacagcacucucau

SEQ ID NO: 5216 - RNA, 19 nt, Artificial Sequence
  Description of Artificial Sequence: Synthetic oligonucleotide
uacaaacacagcacucuca

SEQ ID NO: 5217 - RNA, 19 nt, Artificial Sequence
  Description of Artificial Sequence: Synthetic oligonucleotide
cuacaaacacagcacucuc

SEQ ID NO: 5218 - RNA, 19 nt, Artificial Sequence
  Description of Artificial Sequence: Synthetic oligonucleotide
gcuacaaacacagcacucu

SEQ ID NO: 5219 - RNA, 19 nt, Artificial Sequence
  Description of Artificial Sequence: Synthetic oligonucleotide
ggcuacaaacacagcacuc

SEQ ID NO: 5220 - RNA, 19 nt, Artificial Sequence
  Description of Artificial Sequence: Synthetic oligonucleotide
uggcuacaaacacagcacu

SEQ ID NO: 5221 - RNA, 19 nt, Artificial Sequence
  Description of Artificial Sequence: Synthetic oligonucleotide
auggcuacaaacacagcac

SEQ ID NO: 5222 - RNA, 19 nt, Artificial Sequence
  Description of Artificial Sequence: Synthetic oligonucleotide
uauggcuacaaacacagca

SEQ ID NO: 5223 - RNA, 19 nt, Artificial Sequence
  Description of Artificial Sequence: Synthetic oligonucleotide
guauggcuacaaacacagc

SEQ ID NO: 5224 - RNA, 19 nt, Artificial Sequence
  Description of Artificial Sequence: Synthetic oligonucleotide
cguauggcuacaaacacag

SEQ ID NO: 5225 - RNA, 19 nt, Artificial Sequence
  Description of Artificial Sequence: Synthetic oligonucleotide
gcguauggcuacaaacaca

SEQ ID NO: 5226 - RNA, 19 nt, Artificial Sequence
  Description of Artificial Sequence: Synthetic oligonucleotide
ugcguauggcuacaaacac

SEQ ID NO: 5227 - RNA, 19 nt, Artificial Sequence
  Description of Artificial Sequence: Synthetic oligonucleotide
uugcguauggcuacaaaca

SEQ ID NO: 5228 - RNA, 19 nt, Artificial Sequence
  Description of Artificial Sequence: Synthetic oligonucleotide
auugcguauggcuacaaac

SEQ ID NO: 5229 - RNA, 19 nt, Artificial Sequence
  Description of Artificial Sequence: Synthetic oligonucleotide
gauugcguauggcuacaaa

SEQ ID NO: 5230 - RNA, 19 nt, Artificial Sequence
  Description of Artificial Sequence: Synthetic oligonucleotide
cgauugcguauggcuacaa

SEQ ID NO: 5231 - RNA, 19 nt, Artificial Sequence
  Description of Artificial Sequence: Synthetic oligonucleotide
gcgauugcguauggcuaca

SEQ ID NO: 5232 - RNA, 19 nt, Artificial Sequence
  Description of Artificial Sequence: Synthetic oligonucleotide
ggcgauugcguauggcuac

SEQ ID NO: 5233 - RNA, 19 nt, Artificial Sequence
  Description of Artificial Sequence: Synthetic oligonucleotide
aggcgauugcguauggcua

SEQ ID NO: 5234 - RNA, 19 nt, Artificial Sequence
  Description of Artificial Sequence: Synthetic oligonucleotide
caggcgauugcguauggcu

SEQ ID NO: 5235 - RNA, 19 nt, Artificial Sequence
  Description of Artificial Sequence: Synthetic oligonucleotide
gcaggcgauugcguauggc

SEQ ID NO: 5236 - RNA, 19 nt, Artificial Sequence
  Description of Artificial Sequence: Synthetic oligonucleotide
ugcaggcgauugcguaugg

SEQ ID NO: 5237 - RNA, 19 nt, Artificial Sequence
  Description of Artificial Sequence: Synthetic oligonucleotide
augcaggcgauugcguaug

SEQ ID NO: 5238 - RNA, 19 nt, Artificial Sequence
  Description of Artificial Sequence: Synthetic oligonucleotide
caugcaggcgauugcguau

SEQ ID NO: 5239 - RNA, 19 nt, Artificial Sequence
  Description of Artificial Sequence: Synthetic oligonucleotide
acaugcaggcgauugcgua

SEQ ID NO: 5240 - RNA, 19 nt, Artificial Sequence
  Description of Artificial Sequence: Synthetic oligonucleotide
cacaugcaggcgauugcgu

SEQ ID NO: 5241 - RNA, 19 nt, Artificial Sequence
  Description of Artificial Sequence: Synthetic oligonucleotide
gcacaugcaggcgauugcg

SEQ ID NO: 5242 - RNA, 19 nt, Artificial Sequence
  Description of Artificial Sequence: Synthetic oligonucleotide
agcacaugcaggcgauugc

SEQ ID NO: 5243 - RNA, 19 nt, Artificial Sequence
  Description of Artificial Sequence: Synthetic oligonucleotide
aagcacaugcaggcgauug

SEQ ID NO: 5244 - RNA, 19 nt, Artificial Sequence
  Description of Artificial Sequence: Synthetic oligonucleotide
caagcacaugcaggcgauu

SEQ ID NO: 5245 - RNA, 19 nt, Artificial Sequence
  Description of Artificial Sequence: Synthetic oligonucleotide
ccaagcacaugcaggcgau

SEQ ID NO: 5246 - RNA, 19 nt, Artificial Sequence
  Description of Artificial Sequence: Synthetic oligonucleotide
cccaagcacaugcaggcga

SEQ ID NO: 5247 - RNA, 19 nt, Artificial Sequence
  Description of Artificial Sequence: Synthetic oligonucleotide
gcccaagcacaugcaggcg

SEQ ID NO: 5248 - RNA, 19 nt, Artificial Sequence
  Description of Artificial Sequence: Synthetic oligonucleotide
ggcccaagcacaugcaggc

SEQ ID NO: 5249 - RNA, 19 nt, Artificial Sequence
  Description of Artificial Sequence: Synthetic oligonucleotide
aggcccaagcacaugcagg

SEQ ID NO: 5250 - RNA, 19 nt, Artificial Sequence
  Description of Artificial Sequence: Synthetic oligonucleotide
caggcccaagcacaugcag

SEQ ID NO: 5251 - RNA, 19 nt, Artificial Sequence
  Description of Artificial Sequence: Synthetic oligonucleotide
ucaggcccaagcacaugca

SEQ ID NO: 5252 - RNA, 19 nt, Artificial Sequence
  Description of Artificial Sequence: Synthetic oligonucleotide
gucaggcccaagcacaugc

SEQ ID NO: 5253 - RNA, 19 nt, Artificial Sequence
  Description of Artificial Sequence: Synthetic oligonucleotide
ggucaggcccaagcacaug

SEQ ID NO: 5254 - RNA, 19 nt, Artificial Sequence
  Description of Artificial Sequence: Synthetic oligonucleotide
aggucaggcccaagcacau

SEQ ID NO: 5255 - RNA, 19 nt, Artificial Sequence
  Description of Artificial Sequence: Synthetic oligonucleotide
caggucaggcccaagcaca

SEQ ID NO: 5256 - RNA, 19 nt, Artificial Sequence
  Description of Artificial Sequence: Synthetic oligonucleotide
ucaggucaggcccaagcac

SEQ ID NO: 5257 - RNA, 19 nt, Artificial Sequence
  Description of Artificial Sequence: Synthetic oligonucleotide
uucaggucaggcccaagca

SEQ ID NO: 5258 - RNA, 19 nt, Artificial Sequence
  Description of Artificial Sequence: Synthetic oligonucleotide
cuucaggucaggcccaagc

SEQ ID NO: 5259 - RNA, 19 nt, Artificial Sequence
  Description of Artificial Sequence: Synthetic oligonucleotide
acuucaggucaggcccaag

SEQ ID NO: 5260 - RNA, 19 nt, Artificial Sequence
  Description of Artificial Sequence: Synthetic oligonucleotide
gacuucaggucaggcccaa

SEQ ID NO: 5261 - RNA, 19 nt, Artificial Sequence
  Description of Artificial Sequence: Synthetic oligonucleotide
agacuucaggucaggccca

SEQ ID NO: 5262 - RNA, 19 nt, Artificial Sequence
  Description of Artificial Sequence: Synthetic oligonucleotide
cagacuucaggucaggccc

SEQ ID NO: 5263 - RNA, 19 nt, Artificial Sequence
  Description of Artificial Sequence: Synthetic oligonucleotide
acagacuucaggucaggcc

SEQ ID NO: 5264 - RNA, 19 nt, Artificial Sequence
  Description of Artificial Sequence: Synthetic oligonucleotide
gacagacuucaggucaggc

SEQ ID NO: 5265 - RNA, 19 nt, Artificial Sequence
  Description of Artificial Sequence: Synthetic oligonucleotide
ggacagacuucaggucagg

SEQ ID NO: 5266 - RNA, 19 nt, Artificial Sequence
  Description of Artificial Sequence: Synthetic oligonucleotide
uggacagacuucaggucag

SEQ ID NO: 5267 - RNA, 19 nt, Artificial Sequence
  Description of Artificial Sequence: Synthetic oligonucleotide
cuggacagacuucagguca

SEQ ID NO: 5268 - RNA, 19 nt, Artificial Sequence
  Description of Artificial Sequence: Synthetic oligonucleotide
ucuggacagacuucagguc

SEQ ID NO: 5269 - RNA, 19 nt, Artificial Sequence
  Description of Artificial Sequence: Synthetic oligonucleotide
cucuggacagacuucaggu

SEQ ID NO: 5270 - RNA, 19 nt, Artificial Sequence
  Description of Artificial Sequence: Synthetic oligonucleotide
gcucuggacagacuucagg

SEQ ID NO: 5271 - RNA, 19 nt, Artificial Sequence
  Description of Artificial Sequence: Synthetic oligonucleotide
ggcucuggacagacuucag

SEQ ID NO: 5272 - RNA, 19 nt, Artificial Sequence
  Description of Artificial Sequence: Synthetic oligonucleotide
aggcucuggacagacuuca

SEQ ID NO: 5273 - RNA, 19 nt, Artificial Sequence
  Description of Artificial Sequence: Synthetic oligonucleotide
caggcucuggacagacuuc

SEQ ID NO: 5274 - RNA, 19 nt, Artificial Sequence
  Description of Artificial Sequence: Synthetic oligonucleotide
ccaggcucuggacagacuu

SEQ ID NO: 5275 - RNA, 19 nt, Artificial Sequence
  Description of Artificial Sequence: Synthetic oligonucleotide
gccaggcucuggacagacu

SEQ ID NO: 5276 - RNA, 19 nt, Artificial Sequence
  Description of Artificial Sequence: Synthetic oligonucleotide
ggccaggcucuggacagac

SEQ ID NO: 5277 - RNA, 19 nt, Artificial Sequence
  Description of Artificial Sequence: Synthetic oligonucleotide
uggccaggcucuggacaga

SEQ ID NO: 5278 - RNA, 19 nt, Artificial Sequence
  Description of Artificial Sequence: Synthetic oligonucleotide
guggccaggcucuggacag

SEQ ID NO: 5279 - RNA, 19 nt, Artificial Sequence
  Description of Artificial Sequence: Synthetic oligonucleotide
cguggccaggcucuggaca

SEQ ID NO: 5280 - RNA, 19 nt, Artificial Sequence
  Description of Artificial Sequence: Synthetic oligonucleotide
ccguggccaggcucuggac

SEQ ID NO: 5281 - RNA, 19 nt, Artificial Sequence
  Description of Artificial Sequence: Synthetic oligonucleotide
cccguggccaggcucugga

SEQ ID NO: 5282 - RNA, 19 nt, Artificial Sequence
  Description of Artificial Sequence: Synthetic oligonucleotide
gcccguggccaggcucugg

SEQ ID NO: 5283 - RNA, 19 nt, Artificial Sequence
  Description of Artificial Sequence: Synthetic oligonucleotide
ggcccguggccaggcucug

SEQ ID NO: 5284 - RNA, 19 nt, Artificial Sequence
  Description of Artificial Sequence: Synthetic oligonucleotide
gggcccguggccaggcucu

SEQ ID NO: 5285 - RNA, 19 nt, Artificial Sequence
  Description of Artificial Sequence: Synthetic oligonucleotide
agggcccguggccaggcuc

SEQ ID NO: 5286 - RNA, 19 nt, Artificial Sequence
  Description of Artificial Sequence: Synthetic oligonucleotide
cagggcccguggccaggcu

SEQ ID NO: 5287 - RNA, 19 nt, Artificial Sequence
  Description of Artificial Sequence: Synthetic oligonucleotide
gcagggcccguggccaggc

SEQ ID NO: 5288 - RNA, 19 nt, Artificial Sequence
  Description of Artificial Sequence: Synthetic oligonucleotide
agcagggcccguggccagg

SEQ ID NO: 5289 - RNA, 19 nt, Artificial Sequence
  Description of Artificial Sequence: Synthetic oligonucleotide
cagcagggcccguggccag

SEQ ID NO: 5290 - RNA, 19 nt, Artificial Sequence
  Description of Artificial Sequence: Synthetic oligonucleotide
ccagcagggcccguggcca

SEQ ID NO: 5291 - RNA, 19 nt, Artificial Sequence
  Description of Artificial Sequence: Synthetic oligonucleotide
uccagcagggcccguggcc

SEQ ID NO: 5292 - RNA, 19 nt, Artificial Sequence
  Description of Artificial Sequence: Synthetic oligonucleotide
cuccagcagggcccguggc

SEQ ID NO: 5293 - RNA, 19 nt, Artificial Sequence
  Description of Artificial Sequence: Synthetic oligonucleotide
ucuccagcagggcccgugg

SEQ ID NO: 5294 - RNA, 19 nt, Artificial Sequence
  Description of Artificial Sequence: Synthetic oligonucleotide
gucuccagcagggcccgug

SEQ ID NO: 5295 - RNA, 19 nt, Artificial Sequence
  Description of Artificial Sequence: Synthetic oligonucleotide
ggucuccagcagggcccgu

SEQ ID NO: 5296 - RNA, 19 nt, Artificial Sequence
  Description of Artificial Sequence: Synthetic oligonucleotide
gggucuccagcagggcccg

SEQ ID NO: 5297 - RNA, 19 nt, Artificial Sequence
  Description of Artificial Sequence: Synthetic oligonucleotide
agggucuccagcagggccc

SEQ ID NO: 5298 - RNA, 19 nt, Artificial Sequence
  Description of Artificial Sequence: Synthetic oligonucleotide
cagggucuccagcagggcc

SEQ ID NO: 5299 - RNA, 19 nt, Artificial Sequence
  Description of Artificial Sequence: Synthetic oligonucleotide
ccagggucuccagcagggc

SEQ ID NO: 5300 - RNA, 19 nt, Artificial Sequence
  Description of Artificial Sequence: Synthetic oligonucleotide
gccagggucuccagcaggg

SEQ ID NO: 5301 - RNA, 19 nt, Artificial Sequence
  Description of Artificial Sequence: Synthetic oligonucleotide
agccagggucuccagcagg

SEQ ID NO: 5302 - RNA, 19 nt, Artificial Sequence
  Description of Artificial Sequence: Synthetic oligonucleotide
cagccagggucuccagcag

SEQ ID NO: 5303 - RNA, 19 nt, Artificial Sequence
  Description of Artificial Sequence: Synthetic oligonucleotide
gcagccagggucuccagca

SEQ ID NO: 5304 - RNA, 19 nt, Artificial Sequence
  Description of Artificial Sequence: Synthetic oligonucleotide
ggcagccagggucuccagc

SEQ ID NO: 5305 - RNA, 19 nt, Artificial Sequence
  Description of Artificial Sequence: Synthetic oligonucleotide
uggcagccagggucuccag

SEQ ID NO: 5306 - RNA, 19 nt, Artificial Sequence
  Description of Artificial Sequence: Synthetic oligonucleotide
cuggcagccagggucucca

SEQ ID NO: 5307 - RNA, 19 nt, Artificial Sequence
  Description of Artificial Sequence: Synthetic oligonucleotide
ucuggcagccagggucucc

SEQ ID NO: 5308 - RNA, 19 nt, Artificial Sequence
  Description of Artificial Sequence: Synthetic oligonucleotide
gucuggcagccagggucuc

SEQ ID NO: 5309 - RNA, 19 nt, Artificial Sequence
  Description of Artificial Sequence: Synthetic oligonucleotide
cgucuggcagccagggucu

SEQ ID NO: 5310 - RNA, 19 nt, Artificial Sequence
  Description of Artificial Sequence: Synthetic oligonucleotide
acgucuggcagccaggguc

SEQ ID NO: 5311 - RNA, 19 nt, Artificial Sequence
  Description of Artificial Sequence: Synthetic oligonucleotide
cacgucuggcagccagggu

SEQ ID NO: 5312 - RNA, 19 nt, Artificial Sequence
  Description of Artificial Sequence: Synthetic oligonucleotide
acacgucuggcagccaggg

SEQ ID NO: 5313 - RNA, 19 nt, Artificial Sequence
  Description of Artificial Sequence: Synthetic oligonucleotide
cacacgucuggcagccagg

SEQ ID NO: 5314 - RNA, 19 nt, Artificial Sequence
  Description of Artificial Sequence: Synthetic oligonucleotide
gcacacgucuggcagccag

SEQ ID NO: 5315 - RNA, 19 nt, Artificial Sequence
  Description of Artificial Sequence: Synthetic oligonucleotide
ugcacacgucuggcagcca

SEQ ID NO: 5316 - RNA, 19 nt, Artificial Sequence
  Description of Artificial Sequence: Synthetic oligonucleotide
cugcacacgucuggcagcc

SEQ ID NO: 5317 - RNA, 19 nt, Artificial Sequence
  Description of Artificial Sequence: Synthetic oligonucleotide
gcugcacacgucuggcagc

SEQ ID NO: 5318 - RNA, 19 nt, Artificial Sequence
  Description of Artificial Sequence: Synthetic oligonucleotide
ggcugcacacgucuggcag

SEQ ID NO: 5319 - RNA, 19 nt, Artificial Sequence
  Description of Artificial Sequence: Synthetic oligonucleotide
aggcugcacacgucuggca

SEQ ID NO: 5320 - RNA, 19 nt, Artificial Sequence
  Description of Artificial Sequence: Synthetic oligonucleotide
caggcugcacacgucuggc

SEQ ID NO: 5321 - RNA, 19 nt, Artificial Sequence
  Description of Artificial Sequence: Synthetic oligonucleotide
acaggcugcacacgucugg

SEQ ID NO: 5322 - RNA, 19 nt, Artificial Sequence
  Description of Artificial Sequence: Synthetic oligonucleotide
cacaggcugcacacgucug

SEQ ID NO: 5323 - RNA, 19 nt, Artificial Sequence
  Description of Artificial Sequence: Synthetic oligonucleotide
ccacaggcugcacacgucu

SEQ ID NO: 5324 - RNA, 19 nt, Artificial Sequence
  Description of Artificial Sequence: Synthetic oligonucleotide
gccacaggcugcacacguc

SEQ ID NO: 5325 - RNA, 19 nt, Artificial Sequence
  Description of Artificial Sequence: Synthetic oligonucleotide
ggccacaggcugcacacgu

SEQ ID NO: 5326 - RNA, 19 nt, Artificial Sequence
  Description of Artificial Sequence: Synthetic oligonucleotide
gggccacaggcugcacacg

SEQ ID NO: 5327 - RNA, 19 nt, Artificial Sequence
  Description of Artificial Sequence: Synthetic oligonucleotide
ugggccacaggcugcacac

SEQ ID NO: 5328 - RNA, 19 nt, Artificial Sequence
  Description of Artificial Sequence: Synthetic oligonucleotide
cugggccacaggcugcaca

SEQ ID NO: 5329 - RNA, 19 nt, Artificial Sequence
  Description of Artificial Sequence: Synthetic oligonucleotide
ccugggccacaggcugcac

SEQ ID NO: 5330 - RNA, 19 nt, Artificial Sequence
  Description of Artificial Sequence: Synthetic oligonucleotide
uccugggccacaggcugca

SEQ ID NO: 5331 - RNA, 19 nt, Artificial Sequence
  Description of Artificial Sequence: Synthetic oligonucleotide
guccugggccacaggcugc

SEQ ID NO: 5332 - RNA, 19 nt, Artificial Sequence
  Description of Artificial Sequence: Synthetic oligonucleotide
gguccugggccacaggcug

SEQ ID NO: 5333 - RNA, 19 nt, Artificial Sequence
  Description of Artificial Sequence: Synthetic oligonucleotide
ggguccugggccacaggcu

SEQ ID NO: 5334 - RNA, 19 nt, Artificial Sequence
  Description of Artificial Sequence: Synthetic oligonucleotide
gggguccugggccacaggc

SEQ ID NO: 5335 - RNA, 19 nt, Artificial Sequence
  Description of Artificial Sequence: Synthetic oligonucleotide
ugggguccugggccacagg

SEQ ID NO: 5336 - RNA, 19 nt, Artificial Sequence
  Description of Artificial Sequence: Synthetic oligonucleotide
gugggguccugggccacag

SEQ ID NO: 5337 - RNA, 19 nt, Artificial Sequence
  Description of Artificial Sequence: Synthetic oligonucleotide
cgugggguccugggccaca

SEQ ID NO: 5338 - RNA, 19 nt, Artificial Sequence
  Description of Artificial Sequence: Synthetic oligonucleotide
ccgugggguccugggccac

SEQ ID NO: 5339 - RNA, 19 nt, Artificial Sequence
  Description of Artificial Sequence: Synthetic oligonucleotide
gccgugggguccugggcca

SEQ ID NO: 5340 - RNA, 19 nt, Artificial Sequence
  Description of Artificial Sequence: Synthetic oligonucleotide
ggccgugggguccugggcc

SEQ ID NO: 5341 - RNA, 19 nt, Artificial Sequence
  Description of Artificial Sequence: Synthetic oligonucleotide
gggccgugggguccugggc

SEQ ID NO: 5342 - RNA, 19 nt, Artificial Sequence
  Description of Artificial Sequence: Synthetic oligonucleotide
agggccgugggguccuggg

SEQ ID NO: 5343 - RNA, 19 nt, Artificial Sequence
  Description of Artificial Sequence: Synthetic oligonucleotide
gagggccgugggguccugg

SEQ ID NO: 5344 - RNA, 19 nt, Artificial Sequence
  Description of Artificial Sequence: Synthetic oligonucleotide
ggagggccgugggguccug

SEQ ID NO: 5345 - RNA, 19 nt, Artificial Sequence
  Description of Artificial Sequence: Synthetic oligonucleotide
gggagggccgugggguccu

SEQ ID NO: 5346 - RNA, 19 nt, Artificial Sequence
  Description of Artificial Sequence: Synthetic oligonucleotide
cgggagggccguggggucc

SEQ ID NO: 5347 - RNA, 19 nt, Artificial Sequence
  Description of Artificial Sequence: Synthetic oligonucleotide
ccgggagggccgugggguc

SEQ ID NO: 5348 - RNA, 19 nt, Artificial Sequence
  Description of Artificial Sequence: Synthetic oligonucleotide
accgggagggccguggggu

SEQ ID NO: 5349 - RNA, 19 nt, Artificial Sequence
  Description of Artificial Sequence: Synthetic oligonucleotide
caccgggagggccgugggg

SEQ ID NO: 5350 - RNA, 19 nt, Artificial Sequence
  Description of Artificial Sequence: Synthetic oligonucleotide
ucaccgggagggccguggg

SEQ ID NO: 5351 - RNA, 19 nt, Artificial Sequence
  Description of Artificial Sequence: Synthetic oligonucleotide
gucaccgggagggccgugg

SEQ ID NO: 5352 - RNA, 19 nt, Artificial Sequence
  Description of Artificial Sequence: Synthetic oligonucleotide
ugucaccgggagggccgug

SEQ ID NO: 5353 - RNA, 19 nt, Artificial Sequence
  Description of Artificial Sequence: Synthetic oligonucleotide
gugucaccgggagggccgu

SEQ ID NO: 5354 - RNA, 19 nt, Artificial Sequence
  Description of Artificial Sequence: Synthetic oligonucleotide
ugugucaccgggagggccg

SEQ ID NO: 5355 - RNA, 19 nt, Artificial Sequence
  Description of Artificial Sequence: Synthetic oligonucleotide
cugugucaccgggagggcc

SEQ ID NO: 5356 - RNA, 19 nt, Artificial Sequence
  Description of Artificial Sequence: Synthetic oligonucleotide
ucugugucaccgggagggc

SEQ ID NO: 5357 - RNA, 19 nt, Artificial Sequence
  Description of Artificial Sequence: Synthetic oligonucleotide
gucugugucaccgggaggg

SEQ ID NO: 5358 - RNA, 19 nt, Artificial Sequence
  Description of Artificial Sequence: Synthetic oligonucleotide
ugucugugucaccgggagg

SEQ ID NO: 5359 - RNA, 19 nt, Artificial Sequence
  Description of Artificial Sequence: Synthetic oligonucleotide
gugucugugucaccgggag

SEQ ID NO: 5360 - RNA, 19 nt, Artificial Sequence
  Description of Artificial Sequence: Synthetic oligonucleotide
ugugucugugucaccggga

SEQ ID NO: 5361 - RNA, 19 nt, Artificial Sequence
  Description of Artificial Sequence: Synthetic oligonucleotide
uugugucugugucaccggg

SEQ ID NO: 5362 - RNA, 19 nt, Artificial Sequence
  Description of Artificial Sequence: Synthetic oligonucleotide
uuugugucugugucaccgg

SEQ ID NO: 5363 - RNA, 19 nt, Artificial Sequence
  Description of Artificial Sequence: Synthetic oligonucleotide
cuuugugucugugucaccg

SEQ ID NO: 5364 - RNA, 19 nt, Artificial Sequence
  Description of Artificial Sequence: Synthetic oligonucleotide
ccuuugugucugugucacc

SEQ ID NO: 5365 - RNA, 19 nt, Artificial Sequence
  Description of Artificial Sequence: Synthetic oligonucleotide
accuuugugucugugucac

SEQ ID NO: 5366 - RNA, 19 nt, Artificial Sequence
  Description of Artificial Sequence: Synthetic oligonucleotide
caccuuugugucuguguca

SEQ ID NO: 5367 - RNA, 19 nt, Artificial Sequence
  Description of Artificial Sequence: Synthetic oligonucleotide
gcaccuuugugucuguguc

SEQ ID NO: 5368 - RNA, 19 nt, Artificial Sequence
  Description of Artificial Sequence: Synthetic oligonucleotide
agcaccuuugugucugugu

SEQ ID NO: 5369 - RNA, 19 nt, Artificial Sequence
  Description of Artificial Sequence: Synthetic oligonucleotide
cagcaccuuugugucugug

SEQ ID NO: 5370 - RNA, 19 nt, Artificial Sequence
  Description of Artificial Sequence: Synthetic oligonucleotide
ccagcaccuuugugucugu

SEQ ID NO: 5371 - RNA, 19 nt, Artificial Sequence
  Description of Artificial Sequence: Synthetic oligonucleotide
accagcaccuuugugucug

SEQ ID NO: 5372 - RNA, 19 nt, Artificial Sequence
  Description of Artificial Sequence: Synthetic oligonucleotide
caccagcaccuuugugucu

SEQ ID NO: 5373 - RNA, 19 nt, Artificial Sequence
  Description of Artificial Sequence: Synthetic oligonucleotide
gcaccagcaccuuuguguc

SEQ ID NO: 5374 - RNA, 19 nt, Artificial Sequence
  Description of Artificial Sequence: Synthetic oligonucleotide
agcaccagcaccuuugugu

SEQ ID NO: 5375 - RNA, 19 nt, Artificial Sequence
  Description of Artificial Sequence: Synthetic oligonucleotide
cagcaccagcaccuuugug

SEQ ID NO: 5376 - RNA, 19 nt, Artificial Sequence
  Description of Artificial Sequence: Synthetic oligonucleotide
ccagcaccagcaccuuugu

SEQ ID NO: 5377 - RNA, 19 nt, Artificial Sequence
  Description of Artificial Sequence: Synthetic oligonucleotide
uccagcaccagcaccuuug

SEQ ID NO: 5378 - RNA, 19 nt, Artificial Sequence
  Description of Artificial Sequence: Synthetic oligonucleotide
auccagcaccagcaccuuu

SEQ ID NO: 5379 - RNA, 19 nt, Artificial Sequence
  Description of Artificial Sequence: Synthetic oligonucleotide
gauccagcaccagcaccuu

SEQ ID NO: 5380 - RNA, 19 nt, Artificial Sequence
  Description of Artificial Sequence: Synthetic oligonucleotide
ggauccagcaccagcaccu

SEQ ID NO: 5381 - RNA, 19 nt, Artificial Sequence
  Description of Artificial Sequence: Synthetic oligonucleotide
gggauccagcaccagcacc

SEQ ID NO: 5382 - RNA, 19 nt, Artificial Sequence
  Description of Artificial Sequence: Synthetic oligonucleotide
cgggauccagcaccagcac

SEQ ID NO: 5383 - RNA, 19 nt, Artificial Sequence
  Description of Artificial Sequence: Synthetic oligonucleotide
gcgggauccagcaccagca

SEQ ID NO: 5384 - RNA, 19 nt, Artificial Sequence
  Description of Artificial Sequence: Synthetic oligonucleotide
cgcgggauccagcaccagc

SEQ ID NO: 5385 - RNA, 19 nt, Artificial Sequence
  Description of Artificial Sequence: Synthetic oligonucleotide
gcgcgggauccagcaccag

SEQ ID NO: 5386 - RNA, 19 nt, Artificial Sequence
  Description of Artificial Sequence: Synthetic oligonucleotide
agcgcgggauccagcacca

SEQ ID NO: 5387 - RNA, 19 nt, Artificial Sequence
  Description of Artificial Sequence: Synthetic oligonucleotide
cagcgcgggauccagcacc

SEQ ID NO: 5388 - RNA, 19 nt, Artificial Sequence
  Description of Artificial Sequence: Synthetic oligonucleotide
gcagcgcgggauccagcac

SEQ ID NO: 5389 - RNA, 19 nt, Artificial Sequence
  Description of Artificial Sequence: Synthetic oligonucleotide
ggcagcgcgggauccagca

SEQ ID NO: 5390 - RNA, 19 nt, Artificial Sequence
  Description of Artificial Sequence: Synthetic oligonucleotide
aggcagcgcgggauccagc

SEQ ID NO: 5391 - RNA, 19 nt, Artificial Sequence
  Description of Artificial Sequence: Synthetic oligonucleotide
caggcagcgcgggauccag

SEQ ID NO: 5392 - RNA, 19 nt, Artificial Sequence
  Description of Artificial Sequence: Synthetic oligonucleotide
gcaggcagcgcgggaucca

SEQ ID NO: 5393 - RNA, 19 nt, Artificial Sequence
  Description of Artificial Sequence: Synthetic oligonucleotide
cgcaggcagcgcgggaucc

SEQ ID NO: 5394 - RNA, 19 nt, Artificial Sequence
  Description of Artificial Sequence: Synthetic oligonucleotide
gcgcaggcagcgcgggauc

SEQ ID NO: 5395 - RNA, 19 nt, Artificial Sequence
  Description of Artificial Sequence: Synthetic oligonucleotide
agcgcaggcagcgcgggau

SEQ ID NO: 5396 - RNA, 19 nt, Artificial Sequence
  Description of Artificial Sequence: Synthetic oligonucleotide
cagcgcaggcagcgcggga

SEQ ID NO: 5397 - RNA, 19 nt, Artificial Sequence
  Description of Artificial Sequence: Synthetic oligonucleotide
ccagcgcaggcagcgcggg

SEQ ID NO: 5398 - RNA, 19 nt, Artificial Sequence
  Description of Artificial Sequence: Synthetic oligonucleotide
accagcgcaggcagcgcgg

SEQ ID NO: 5399 - RNA, 19 nt, Artificial Sequence
  Description of Artificial Sequence: Synthetic oligonucleotide
gaccagcgcaggcagcgcg

SEQ ID NO: 5400 - RNA, 19 nt, Artificial Sequence
  Description of Artificial Sequence: Synthetic oligonucleotide
ugaccagcgcaggcagcgc

SEQ ID NO: 5401 - RNA, 19 nt, Artificial Sequence
  Description of Artificial Sequence: Synthetic oligonucleotide
cugaccagcgcaggcagcg

SEQ ID NO: 5402 - RNA, 19 nt, Artificial Sequence
  Description of Artificial Sequence: Synthetic oligonucleotide
acugaccagcgcaggcagc

SEQ ID NO: 5403 - RNA, 19 nt, Artificial Sequence
  Description of Artificial Sequence: Synthetic oligonucleotide
aacugaccagcgcaggcag

SEQ ID NO: 5404 - RNA, 19 nt, Artificial Sequence
  Description of Artificial Sequence: Synthetic oligonucleotide
caacugaccagcgcaggca

SEQ ID NO: 5405 - RNA, 19 nt, Artificial Sequence
  Description of Artificial Sequence: Synthetic oligonucleotide
acaacugaccagcgcaggc

SEQ ID NO: 5406 - RNA, 19 nt, Artificial Sequence
  Description of Artificial Sequence: Synthetic oligonucleotide
cacaacugaccagcgcagg

SEQ ID NO: 5407 - RNA, 19 nt, Artificial Sequence
  Description of Artificial Sequence: Synthetic oligonucleotide
ccacaacugaccagcgcag

SEQ ID NO: 5408 - RNA, 19 nt, Artificial Sequence
  Description of Artificial Sequence: Synthetic oligonucleotide
gccacaacugaccagcgca

SEQ ID NO: 5409 - RNA, 19 nt, Artificial Sequence
  Description of Artificial Sequence: Synthetic oligonucleotide
agccacaacugaccagcgc

SEQ ID NO: 5410 - RNA, 19 nt, Artificial Sequence
  Description of Artificial Sequence: Synthetic oligonucleotide
gagccacaacugaccagcg

SEQ ID NO: 5411 - RNA, 19 nt, Artificial Sequence
  Description of Artificial Sequence: Synthetic oligonucleotide
ggagccacaacugaccagc

SEQ ID NO: 5412 - RNA, 19 nt, Artificial Sequence
  Description of Artificial Sequence: Synthetic oligonucleotide
uggagccacaacugaccag

SEQ ID NO: 5413 - RNA, 19 nt, Artificial Sequence
  Description of Artificial Sequence: Synthetic oligonucleotide
cuggagccacaacugacca

SEQ ID NO: 5414 - RNA, 19 nt, Artificial Sequence
  Description of Artificial Sequence: Synthetic oligonucleotide
gcuggagccacaacugacc

SEQ ID NO: 5415 - RNA, 19 nt, Artificial Sequence
  Description of Artificial Sequence: Synthetic oligonucleotide
ggcuggagccacaacugac

SEQ ID NO: 5416 - RNA, 19 nt, Artificial Sequence
  Description of Artificial Sequence: Synthetic oligonucleotide
aggcuggagccacaacuga

SEQ ID NO: 5417 - RNA, 19 nt, Artificial Sequence
  Description of Artificial Sequence: Synthetic oligonucleotide
caggcuggagccacaacug

SEQ ID NO: 5418 - RNA, 19 nt, Artificial Sequence
  Description of Artificial Sequence: Synthetic oligonucleotide
gcaggcuggagccacaacu

SEQ ID NO: 5419 - RNA, 19 nt, Artificial Sequence
  Description of Artificial Sequence: Synthetic oligonucleotide
ugcaggcuggagccacaac

SEQ ID NO: 5420 - RNA, 19 nt, Artificial Sequence
  Description of Artificial Sequence: Synthetic oligonucleotide
cugcaggcuggagccacaa

SEQ ID NO: 5421 - RNA, 19 nt, Artificial Sequence
  Description of Artificial Sequence: Synthetic oligonucleotide
ccugcaggcuggagccaca

SEQ ID NO: 5422 - RNA, 19 nt, Artificial Sequence
  Description of Artificial Sequence: Synthetic oligonucleotide
cccugcaggcuggagccac

SEQ ID NO: 5423 - RNA, 19 nt, Artificial Sequence
  Description of Artificial Sequence: Synthetic oligonucleotide
gcccugcaggcuggagcca

SEQ ID NO: 5424 - RNA, 19 nt, Artificial Sequence
  Description of Artificial Sequence: Synthetic oligonucleotide
ggcccugcaggcuggagcc

SEQ ID NO: 5425 - RNA, 19 nt, Artificial Sequence
  Description of Artificial Sequence: Synthetic oligonucleotide
cggcccugcaggcuggagc

SEQ ID NO: 5426 - RNA, 19 nt, Artificial Sequence
  Description of Artificial Sequence: Synthetic oligonucleotide
gcggcccugcaggcuggag

SEQ ID NO: 5427 - RNA, 19 nt, Artificial Sequence
  Description of Artificial Sequence: Synthetic oligonucleotide
agcggcccugcaggcugga

SEQ ID NO: 5428 - RNA, 19 nt, Artificial Sequence
  Description of Artificial Sequence: Synthetic oligonucleotide
cagcggcccugcaggcugg

SEQ ID NO: 5429 - RNA, 19 nt, Artificial Sequence
  Description of Artificial Sequence: Synthetic oligonucleotide
gcagcggcccugcaggcug

SEQ ID NO: 5430 - RNA, 19 nt, Artificial Sequence
  Description of Artificial Sequence: Synthetic oligonucleotide
agcagcggcccugcaggcu

SEQ ID NO: 5431 - RNA, 19 nt, Artificial Sequence
  Description of Artificial Sequence: Synthetic oligonucleotide
aagcagcggcccugcaggc

SEQ ID NO: 5432 - RNA, 19 nt, Artificial Sequence
  Description of Artificial Sequence: Synthetic oligonucleotide
gaagcagcggcccugcagg

SEQ ID NO: 5433 - RNA, 19 nt, Artificial Sequence
  Description of Artificial Sequence: Synthetic oligonucleotide
ggaagcagcggcccugcag

SEQ ID NO: 5434 - RNA, 19 nt, Artificial Sequence
  Description of Artificial Sequence: Synthetic oligonucleotide
aggaagcagcggcccugca

SEQ ID NO: 5435 - RNA, 19 nt, Artificial Sequence
  Description of Artificial Sequence: Synthetic oligonucleotide
caggaagcagcggcccugc

SEQ ID NO: 5436 - RNA, 19 nt, Artificial Sequence
  Description of Artificial Sequence: Synthetic oligonucleotide
gcaggaagcagcggcccug

SEQ ID NO: 5437 - RNA, 19 nt, Artificial Sequence
  Description of Artificial Sequence: Synthetic oligonucleotide
ugcaggaagcagcggcccu

SEQ ID NO: 5438 - RNA, 19 nt, Artificial Sequence
  Description of Artificial Sequence: Synthetic oligonucleotide
augcaggaagcagcggccc

SEQ ID NO: 5439 - RNA, 19 nt, Artificial Sequence
  Description of Artificial Sequence: Synthetic oligonucleotide
caugcaggaagcagcggcc

SEQ ID NO: 5440 - RNA, 19 nt, Artificial Sequence
  Description of Artificial Sequence: Synthetic oligonucleotide
ucaugcaggaagcagcggc

SEQ ID NO: 5441 - RNA, 19 nt, Artificial Sequence
  Description of Artificial Sequence: Synthetic oligonucleotide
gucaugcaggaagcagcgg

SEQ ID NO: 5442 - RNA, 19 nt, Artificial Sequence
  Description of Artificial Sequence: Synthetic oligonucleotide
ggucaugcaggaagcagcg

SEQ ID NO: 5443 - RNA, 19 nt, Artificial Sequence
  Description of Artificial Sequence: Synthetic oligonucleotide
aggucaugcaggaagcagc

SEQ ID NO: 5444 - RNA, 19 nt, Artificial Sequence
  Description of Artificial Sequence: Synthetic oligonucleotide
uaggucaugcaggaagcag

SEQ ID NO: 5445 - RNA, 19 nt, Artificial Sequence
  Description of Artificial Sequence: Synthetic oligonucleotide
cuaggucaugcaggaagca

SEQ ID NO: 5446 - RNA, 19 nt, Artificial Sequence
  Description of Artificial Sequence: Synthetic oligonucleotide
ucuaggucaugcaggaagc

SEQ ID NO: 5447 - RNA, 19 nt, Artificial Sequence
  Description of Artificial Sequence: Synthetic oligonucleotide
cucuaggucaugcaggaag

SEQ ID NO: 5448 - RNA, 19 nt, Artificial Sequence
  Description of Artificial Sequence: Synthetic oligonucleotide
gcucuaggucaugcaggaa

SEQ ID NO: 5449 - RNA, 19 nt, Artificial Sequence
  Description of Artificial Sequence: Synthetic oligonucleotide
ggcucuaggucaugcagga

SEQ ID NO: 5450 - RNA, 19 nt, Artificial Sequence
  Description of Artificial Sequence: Synthetic oligonucleotide
gggcucuaggucaugcagg

SEQ ID NO: 5451 - RNA, 19 nt, Artificial Sequence
  Description of Artificial Sequence: Synthetic oligonucleotide
ggggcucuaggucaugcag

SEQ ID NO: 5452 - RNA, 19 nt, Artificial Sequence
  Description of Artificial Sequence: Synthetic oligonucleotide
uggggcucuaggucaugca

SEQ ID NO: 5453 - RNA, 19 nt, Artificial Sequence
  Description of Artificial Sequence: Synthetic oligonucleotide
uuggggcucuaggucaugc

SEQ ID NO: 5454 - RNA, 19 nt, Artificial Sequence
  Description of Artificial Sequence: Synthetic oligonucleotide
cuuggggcucuaggucaug

SEQ ID NO: 5455 - RNA, 19 nt, Artificial Sequence
  Description of Artificial Sequence: Synthetic oligonucleotide
ccuuggggcucuaggucau

SEQ ID NO: 5456 - RNA, 19 nt, Artificial Sequence
  Description of Artificial Sequence: Synthetic oligonucleotide
cccuuggggcucuagguca

SEQ ID NO: 5457 - RNA, 19 nt, Artificial Sequence
  Description of Artificial Sequence: Synthetic oligonucleotide
ucccuuggggcucuagguc

SEQ ID NO: 5458 - RNA, 19 nt, Artificial Sequence
  Description of Artificial Sequence: Synthetic oligonucleotide
gucccuuggggcucuaggu

SEQ ID NO: 5459 - RNA, 19 nt, Artificial Sequence
  Description of Artificial Sequence: Synthetic oligonucleotide
ugucccuuggggcucuagg

SEQ ID NO: 5460 - RNA, 19 nt, Artificial Sequence
  Description of Artificial Sequence: Synthetic oligonucleotide
cugucccuuggggcucuag

SEQ ID NO: 5461 - RNA, 19 nt, Artificial Sequence
  Description of Artificial Sequence: Synthetic oligonucleotide
gcugucccuuggggcucua

SEQ ID NO: 5462 - RNA, 19 nt, Artificial Sequence
  Description of Artificial Sequence: Synthetic oligonucleotide
ggcugucccuuggggcucu

SEQ ID NO: 5463 - RNA, 19 nt, Artificial Sequence
  Description of Artificial Sequence: Synthetic oligonucleotide
cggcugucccuuggggcuc

SEQ ID NO: 5464 - RNA, 19 nt, Artificial Sequence
  Description of Artificial Sequence: Synthetic oligonucleotide
acggcugucccuuggggcu

SEQ ID NO: 5465 - RNA, 19 nt, Artificial Sequence
  Description of Artificial Sequence: Synthetic oligonucleotide
cacggcugucccuuggggc

SEQ ID NO: 5466 - RNA, 19 nt, Artificial Sequence
  Description of Artificial Sequence: Synthetic oligonucleotide
gcacggcugucccuugggg

SEQ ID NO: 5467 - RNA, 19 nt, Artificial Sequence
  Description of Artificial Sequence: Synthetic oligonucleotide
ugcacggcugucccuuggg

SEQ ID NO: 5468 - RNA, 19 nt, Artificial Sequence
  Description of Artificial Sequence: Synthetic oligonucleotide
augcacggcugucccuugg

SEQ ID NO: 5469 - RNA, 19 nt, Artificial Sequence
  Description of Artificial Sequence: Synthetic oligonucleotide
gaugcacggcugucccuug

SEQ ID NO: 5470 - RNA, 19 nt, Artificial Sequence
  Description of Artificial Sequence: Synthetic oligonucleotide
agaugcacggcugucccuu

SEQ ID NO: 5471 - RNA, 19 nt, Artificial Sequence
  Description of Artificial Sequence: Synthetic oligonucleotide
cagaugcacggcugucccu

SEQ ID NO: 5472 - RNA, 19 nt, Artificial Sequence
  Description of Artificial Sequence: Synthetic oligonucleotide
ccagaugcacggcuguccc

SEQ ID NO: 5473 - RNA, 19 nt, Artificial Sequence
  Description of Artificial Sequence: Synthetic oligonucleotide
gccagaugcacggcugucc

SEQ ID NO: 5474 - RNA, 19 nt, Artificial Sequence
  Description of Artificial Sequence: Synthetic oligonucleotide
ugccagaugcacggcuguc

SEQ ID NO: 5475 - RNA, 19 nt, Artificial Sequence
  Description of Artificial Sequence: Synthetic oligonucleotide
cugccagaugcacggcugu

SEQ ID NO: 5476 - RNA, 19 nt, Artificial Sequence
  Description of Artificial Sequence: Synthetic oligonucleotide
gcugccagaugcacggcug

SEQ ID NO: 5477 - RNA, 19 nt, Artificial Sequence
  Description of Artificial Sequence: Synthetic oligonucleotide
cgcugccagaugcacggcu

SEQ ID NO: 5478 - RNA, 19 nt, Artificial Sequence
  Description of Artificial Sequence: Synthetic oligonucleotide
gcgcugccagaugcacggc

SEQ ID NO: 5479 - RNA, 19 nt, Artificial Sequence
  Description of Artificial Sequence: Synthetic oligonucleotide
ggcgcugccagaugcacgg

SEQ ID NO: 5480 - RNA, 19 nt, Artificial Sequence
  Description of Artificial Sequence: Synthetic oligonucleotide
uggcgcugccagaugcacg

SEQ ID NO: 5481 - RNA, 19 nt, Artificial Sequence
  Description of Artificial Sequence: Synthetic oligonucleotide
cuggcgcugccagaugcac

SEQ ID NO: 5482 - RNA, 19 nt, Artificial Sequence
  Description of Artificial Sequence: Synthetic oligonucleotide
gcuggcgcugccagaugca

SEQ ID NO: 5483 - RNA, 19 nt, Artificial Sequence
  Description of Artificial Sequence: Synthetic oligonucleotide
ggcuggcgcugccagaugc

SEQ ID NO: 5484 - RNA, 19 nt, Artificial Sequence
  Description of Artificial Sequence: Synthetic oligonucleotide
aggcuggcgcugccagaug

SEQ ID NO: 5485 - RNA, 19 nt, Artificial Sequence
  Description of Artificial Sequence: Synthetic oligonucleotide
caggcuggcgcugccagau

SEQ ID NO: 5486 - RNA, 19 nt, Artificial Sequence
  Description of Artificial Sequence: Synthetic oligonucleotide
gcaggcuggcgcugccaga

SEQ ID NO: 5487 - RNA, 19 nt, Artificial Sequence
  Description of Artificial Sequence: Synthetic oligonucleotide
ggcaggcuggcgcugccag

SEQ ID NO: 5488 - RNA, 19 nt, Artificial Sequence
  Description of Artificial Sequence: Synthetic oligonucleotide
aggcaggcuggcgcugcca

SEQ ID NO: 5489 - RNA, 19 nt, Artificial Sequence
  Description of Artificial Sequence: Synthetic oligonucleotide
gaggcaggcuggcgcugcc

SEQ ID NO: 5490 - RNA, 19 nt, Artificial Sequence
  Description of Artificial Sequence: Synthetic oligonucleotide
agaggcaggcuggcgcugc

SEQ ID NO: 5491 - RNA, 19 nt, Artificial Sequence
  Description of Artificial Sequence: Synthetic oligonucleotide
aagaggcaggcuggcgcug

SEQ ID NO: 5492 - RNA, 19 nt, Artificial Sequence
  Description of Artificial Sequence: Synthetic oligonucleotide
gaagaggcaggcuggcgcu

SEQ ID NO: 5493 - RNA, 19 nt, Artificial Sequence
  Description of Artificial Sequence: Synthetic oligonucleotide
agaagaggcaggcuggcgc

SEQ ID NO: 5494 - RNA, 19 nt, Artificial Sequence
  Description of Artificial Sequence: Synthetic oligonucleotide
gagaagaggcaggcuggcg

SEQ ID NO: 5495 - RNA, 19 nt, Artificial Sequence
  Description of Artificial Sequence: Synthetic oligonucleotide
ugagaagaggcaggcuggc

SEQ ID NO: 5496 - RNA, 19 nt, Artificial Sequence
  Description of Artificial Sequence: Synthetic oligonucleotide
cugagaagaggcaggcugg

SEQ ID NO: 5497 - RNA, 19 nt, Artificial Sequence
  Description of Artificial Sequence: Synthetic oligonucleotide
gcugagaagaggcaggcug

SEQ ID NO: 5498 - RNA, 19 nt, Artificial Sequence
  Description of Artificial Sequence: Synthetic oligonucleotide
ggcugagaagaggcaggcu

SEQ ID NO: 5499 - RNA, 19 nt, Artificial Sequence
  Description of Artificial Sequence: Synthetic oligonucleotide
gggcugagaagaggcaggc

SEQ ID NO: 5500 - RNA, 19 nt, Artificial Sequence
  Description of Artificial Sequence: Synthetic oligonucleotide
ugggcugagaagaggcagg

SEQ ID NO: 5501 - RNA, 19 nt, Artificial Sequence
  Description of Artificial Sequence: Synthetic oligonucleotide
gugggcugagaagaggcag

SEQ ID NO: 5502 - RNA, 19 nt, Artificial Sequence
  Description of Artificial Sequence: Synthetic oligonucleotide
ggugggcugagaagaggca

SEQ ID NO: 5503 - RNA, 19 nt, Artificial Sequence
  Description of Artificial Sequence: Synthetic oligonucleotide
uggugggcugagaagaggc

SEQ ID NO: 5504 - RNA, 19 nt, Artificial Sequence
  Description of Artificial Sequence: Synthetic oligonucleotide
auggugggcugagaagagg

SEQ ID NO: 5505 - RNA, 19 nt, Artificial Sequence
  Description of Artificial Sequence: Synthetic oligonucleotide
uauggugggcugagaagag

SEQ ID NO: 5506 - RNA, 19 nt, Artificial Sequence
  Description of Artificial Sequence: Synthetic oligonucleotide
uuauggugggcugagaaga

SEQ ID NO: 5507 - RNA, 19 nt, Artificial Sequence
  Description of Artificial Sequence: Synthetic oligonucleotide
guuauggugggcugagaag

SEQ ID NO: 5508 - RNA, 19 nt, Artificial Sequence
  Description of Artificial Sequence: Synthetic oligonucleotide
gguuauggugggcugagaa

SEQ ID NO: 5509 - RNA, 19 nt, Artificial Sequence
  Description of Artificial Sequence: Synthetic oligonucleotide
cgguuauggugggcugaga

SEQ ID NO: 5510 - RNA, 19 nt, Artificial Sequence
  Description of Artificial Sequence: Synthetic oligonucleotide
ccgguuauggugggcugag

SEQ ID NO: 5511 - RNA, 19 nt, Artificial Sequence
  Description of Artificial Sequence: Synthetic oligonucleotide
gccgguuauggugggcuga

SEQ ID NO: 5512 - RNA, 19 nt, Artificial Sequence
  Description of Artificial Sequence: Synthetic oligonucleotide
ggccgguuauggugggcug

SEQ ID NO: 5513 - RNA, 19 nt, Artificial Sequence
  Description of Artificial Sequence: Synthetic oligonucleotide
gggccgguuauggugggcu

SEQ ID NO: 5514 - RNA, 19 nt, Artificial Sequence
  Description of Artificial Sequence: Synthetic oligonucleotide
cgggccgguuauggugggc

SEQ ID NO: 5515 - RNA, 19 nt, Artificial Sequence
  Description of Artificial Sequence: Synthetic oligonucleotide
ucgggccgguuaugguggg

SEQ ID NO: 5516 - RNA, 19 nt, Artificial Sequence
  Description of Artificial Sequence: Synthetic oligonucleotide
aucgggccgguuauggugg

SEQ ID NO: 5517 - RNA, 19 nt, Artificial Sequence
  Description of Artificial Sequence: Synthetic oligonucleotide
caucgggccgguuauggug

SEQ ID NO: 5518 - RNA, 19 nt, Artificial Sequence
  Description of Artificial Sequence: Synthetic oligonucleotide
ucaucgggccgguuauggu

SEQ ID NO: 5519 - RNA, 19 nt, Artificial Sequence
  Description of Artificial Sequence: Synthetic oligonucleotide
gucaucgggccgguuaugg

SEQ ID NO: 5520 - RNA, 19 nt, Artificial Sequence
  Description of Artificial Sequence: Synthetic oligonucleotide
agucaucgggccgguuaug

SEQ ID NO: 5521 - RNA, 19 nt, Artificial Sequence
  Description of Artificial Sequence: Synthetic oligonucleotide
cagucaucgggccgguuau

SEQ ID NO: 5522 - RNA, 19 nt, Artificial Sequence
  Description of Artificial Sequence: Synthetic oligonucleotide
gcagucaucgggccgguua

SEQ ID NO: 5523 - RNA, 19 nt, Artificial Sequence
  Description of Artificial Sequence: Synthetic oligonucleotide
ggcagucaucgggccgguu

SEQ ID NO: 5524 - RNA, 19 nt, Artificial Sequence
  Description of Artificial Sequence: Synthetic oligonucleotide
gggcagucaucgggccggu

SEQ ID NO: 5525 - RNA, 19 nt, Artificial Sequence
  Description of Artificial Sequence: Synthetic oligonucleotide
ggggcagucaucgggccgg

SEQ ID NO: 5526 - RNA, 19 nt, Artificial Sequence
  Description of Artificial Sequence: Synthetic oligonucleotide
cggggcagucaucgggccg

SEQ ID NO: 5527 - RNA, 19 nt, Artificial Sequence
  Description of Artificial Sequence: Synthetic oligonucleotide
ucggggcagucaucgggcc

SEQ ID NO: 5528 - RNA, 19 nt, Artificial Sequence
  Description of Artificial Sequence: Synthetic oligonucleotide
gucggggcagucaucgggc

SEQ ID NO: 5529 - RNA, 19 nt, Artificial Sequence
  Description of Artificial Sequence: Synthetic oligonucleotide
agucggggcagucaucggg

SEQ ID NO: 5530 - RNA, 19 nt, Artificial Sequence
  Description of Artificial Sequence: Synthetic oligonucleotide
cagucggggcagucaucgg

SEQ ID NO: 5531 - RNA, 19 nt, Artificial Sequence
  Description of Artificial Sequence: Synthetic oligonucleotide
acagucggggcagucaucg

SEQ ID NO: 5532 - RNA, 19 nt, Artificial Sequence
  Description of Artificial Sequence: Synthetic oligonucleotide
cacagucggggcagucauc

SEQ ID NO: 5533 - RNA, 19 nt, Artificial Sequence
  Description of Artificial Sequence: Synthetic oligonucleotide
acacagucggggcagucau

SEQ ID NO: 5534 - RNA, 19 nt, Artificial Sequence
  Description of Artificial Sequence: Synthetic oligonucleotide
cacacagucggggcaguca

SEQ ID NO: 5535 - RNA, 19 nt, Artificial Sequence
  Description of Artificial Sequence: Synthetic oligonucleotide
ccacacagucggggcaguc

SEQ ID NO: 5536 - RNA, 19 nt, Artificial Sequence
  Description of Artificial Sequence: Synthetic oligonucleotide
gccacacagucggggcagu

SEQ ID NO: 5537 - RNA, 19 nt, Artificial Sequence
  Description of Artificial Sequence: Synthetic oligonucleotide
ggccacacagucggggcag

SEQ ID NO: 5538 - RNA, 19 nt, Artificial Sequence
  Description of Artificial Sequence: Synthetic oligonucleotide
uggccacacagucggggca

SEQ ID NO: 5539 - RNA, 19 nt, Artificial Sequence
  Description of Artificial Sequence: Synthetic oligonucleotide
cuggccacacagucggggc

SEQ ID NO: 5540 - RNA, 19 nt, Artificial Sequence
  Description of Artificial Sequence: Synthetic oligonucleotide
gcuggccacacagucgggg

SEQ ID NO: 5541 - RNA, 19 nt, Artificial Sequence
  Description of Artificial Sequence: Synthetic oligonucleotide
ggcuggccacacagucggg

SEQ ID NO: 5542 - RNA, 19 nt, Artificial Sequence
  Description of Artificial Sequence: Synthetic oligonucleotide
gggcuggccacacagucgg

SEQ ID NO: 5543 - RNA, 19 nt, Artificial Sequence
  Description of Artificial Sequence: Synthetic oligonucleotide
ugggcuggccacacagucg

SEQ ID NO: 5544 - RNA, 19 nt, Artificial Sequence
  Description of Artificial Sequence: Synthetic oligonucleotide
augggcuggccacacaguc

SEQ ID NO: 5545 - RNA, 19 nt, Artificial Sequence
  Description of Artificial Sequence: Synthetic oligonucleotide
aaugggcuggccacacagu

SEQ ID NO: 5546 - RNA, 19 nt, Artificial Sequence
  Description of Artificial Sequence: Synthetic oligonucleotide
caaugggcuggccacacag

SEQ ID NO: 5547 - RNA, 19 nt, Artificial Sequence
  Description of Artificial Sequence: Synthetic oligonucleotide
ccaaugggcuggccacaca

SEQ ID NO: 5548 - RNA, 19 nt, Artificial Sequence
  Description of Artificial Sequence: Synthetic oligonucleotide
cccaaugggcuggccacac

SEQ ID NO: 5549 - RNA, 19 nt, Artificial Sequence
  Description of Artificial Sequence: Synthetic oligonucleotide
gcccaaugggcuggccaca

SEQ ID NO: 5550 - RNA, 19 nt, Artificial Sequence
  Description of Artificial Sequence: Synthetic oligonucleotide
ugcccaaugggcuggccac

SEQ ID NO: 5551 - RNA, 19 nt, Artificial Sequence
  Description of Artificial Sequence: Synthetic oligonucleotide
gugcccaaugggcuggcca

SEQ ID NO: 5552 - RNA, 19 nt, Artificial Sequence
  Description of Artificial Sequence: Synthetic oligonucleotide
ggugcccaaugggcuggcc

SEQ ID NO: 5553 - RNA, 19 nt, Artificial Sequence
  Description of Artificial Sequence: Synthetic oligonucleotide
gggugcccaaugggcuggc

SEQ ID NO: 5554 - RNA, 19 nt, Artificial Sequence
  Description of Artificial Sequence: Synthetic oligonucleotide
cgggugcccaaugggcugg

SEQ ID NO: 5555 - RNA, 19 nt, Artificial Sequence
  Description of Artificial Sequence: Synthetic oligonucleotide
acgggugcccaaugggcug

SEQ ID NO: 5556 - RNA, 19 nt, Artificial Sequence
  Description of Artificial Sequence: Synthetic oligonucleotide
cacgggugcccaaugggcu

SEQ ID NO: 5557 - RNA, 19 nt, Artificial Sequence
  Description of Artificial Sequence: Synthetic oligonucleotide
acacgggugcccaaugggc

SEQ ID NO: 5558 - RNA, 19 nt, Artificial Sequence
  Description of Artificial Sequence: Synthetic oligonucleotide
uacacgggugcccaauggg

SEQ ID NO: 5559 - RNA, 19 nt, Artificial Sequence
  Description of Artificial Sequence: Synthetic oligonucleotide
uuacacgggugcccaaugg

SEQ ID NO: 5560 - RNA, 19 nt, Artificial Sequence
  Description of Artificial Sequence: Synthetic oligonucleotide
guuacacgggugcccaaug

SEQ ID NO: 5561 - RNA, 19 nt, Artificial Sequence
  Description of Artificial Sequence: Synthetic oligonucleotide
aguuacacgggugcccaau

SEQ ID NO: 5562 - RNA, 19 nt, Artificial Sequence
  Description of Artificial Sequence: Synthetic oligonucleotide
caguuacacgggugcccaa

SEQ ID NO: 5563 - RNA, 19 nt, Artificial Sequence
  Description of Artificial Sequence: Synthetic oligonucleotide
acaguuacacgggugccca

SEQ ID NO: 5564 - RNA, 19 nt, Artificial Sequence
  Description of Artificial Sequence: Synthetic oligonucleotide
cacaguuacacgggugccc

SEQ ID NO: 5565 - RNA, 19 nt, Artificial Sequence
  Description of Artificial Sequence: Synthetic oligonucleotide
ccacaguuacacgggugcc

SEQ ID NO: 5566 - RNA, 19 nt, Artificial Sequence
  Description of Artificial Sequence: Synthetic oligonucleotide
accacaguuacacgggugc

SEQ ID NO: 5567 - RNA, 19 nt, Artificial Sequence
  Description of Artificial Sequence: Synthetic oligonucleotide
aaccacaguuacacgggug

SEQ ID NO: 5568 - RNA, 19 nt, Artificial Sequence
  Description of Artificial Sequence: Synthetic oligonucleotide
caaccacaguuacacgggu

SEQ ID NO: 5569 - RNA, 19 nt, Artificial Sequence
  Description of Artificial Sequence: Synthetic oligonucleotide
ucaaccacaguuacacggg

SEQ ID NO: 5570 - RNA, 19 nt, Artificial Sequence
  Description of Artificial Sequence: Synthetic oligonucleotide
cucaaccacaguuacacgg

SEQ ID NO: 5571 - RNA, 19 nt, Artificial Sequence
  Description of Artificial Sequence: Synthetic oligonucleotide
gcucaaccacaguuacacg

SEQ ID NO: 5572 - RNA, 19 nt, Artificial Sequence
  Description of Artificial Sequence: Synthetic oligonucleotide
ugcucaaccacaguuacac

SEQ ID NO: 5573 - RNA, 19 nt, Artificial Sequence
  Description of Artificial Sequence: Synthetic oligonucleotide
uugcucaaccacaguuaca

SEQ ID NO: 5574 - RNA, 19 nt, Artificial Sequence
  Description of Artificial Sequence: Synthetic oligonucleotide
cuugcucaaccacaguuac

SEQ ID NO: 5575 - RNA, 19 nt, Artificial Sequence
  Description of Artificial Sequence: Synthetic oligonucleotide
ccuugcucaaccacaguua

SEQ ID NO: 5576 - RNA, 19 nt, Artificial Sequence
  Description of Artificial Sequence: Synthetic oligonucleotide
gccuugcucaaccacaguu

SEQ ID NO: 5577 - RNA, 19 nt, Artificial Sequence
  Description of Artificial Sequence: Synthetic oligonucleotide
ggccuugcucaaccacagu

SEQ ID NO: 5578 - RNA, 19 nt, Artificial Sequence
  Description of Artificial Sequence: Synthetic oligonucleotide
uggccuugcucaaccacag

SEQ ID NO: 5579 - RNA, 19 nt, Artificial Sequence
  Description of Artificial Sequence: Synthetic oligonucleotide
cuggccuugcucaaccaca

SEQ ID NO: 5580 - RNA, 19 nt, Artificial Sequence
  Description of Artificial Sequence: Synthetic oligonucleotide
ccuggccuugcucaaccac

SEQ ID NO: 5581 - RNA, 19 nt, Artificial Sequence
  Description of Artificial Sequence: Synthetic oligonucleotide
gccuggccuugcucaacca

SEQ ID NO: 5582 - RNA, 19 nt, Artificial Sequence
  Description of Artificial Sequence: Synthetic oligonucleotide
ggccuggccuugcucaacc

SEQ ID NO: 5583 - RNA, 19 nt, Artificial Sequence
  Description of Artificial Sequence: Synthetic oligonucleotide
aggccuggccuugcucaac

SEQ ID NO: 5584 - RNA, 19 nt, Artificial Sequence
  Description of Artificial Sequence: Synthetic oligonucleotide
gaggccuggccuugcucaa

SEQ ID NO: 5585 - RNA, 19 nt, Artificial Sequence
  Description of Artificial Sequence: Synthetic oligonucleotide
ggaggccuggccuugcuca

SEQ ID NO: 5586 - RNA, 19 nt, Artificial Sequence
  Description of Artificial Sequence: Synthetic oligonucleotide
aggaggccuggccuugcuc

SEQ ID NO: 5587 - RNA, 19 nt, Artificial Sequence
  Description of Artificial Sequence: Synthetic oligonucleotide
uaggaggccuggccuugcu

SEQ ID NO: 5588 - RNA, 19 nt, Artificial Sequence
  Description of Artificial Sequence: Synthetic oligonucleotide
auaggaggccuggccuugc

SEQ ID NO: 5589 - RNA, 19 nt, Artificial Sequence
  Description of Artificial Sequence: Synthetic oligonucleotide
aauaggaggccuggccuug

SEQ ID NO: 5590 - RNA, 19 nt, Artificial Sequence
  Description of Artificial Sequence: Synthetic oligonucleotide
aaauaggaggccuggccuu

SEQ ID NO: 5591 - RNA, 19 nt, Artificial Sequence
  Description of Artificial Sequence: Synthetic oligonucleotide
gaaauaggaggccuggccu

SEQ ID NO: 5592 - RNA, 19 nt, Artificial Sequence
  Description of Artificial Sequence: Synthetic oligonucleotide
agaaauaggaggccuggcc

SEQ ID NO: 5593 - RNA, 19 nt, Artificial Sequence
  Description of Artificial Sequence: Synthetic oligonucleotide
uagaaauaggaggccuggc

SEQ ID NO: 5594 - RNA, 19 nt, Artificial Sequence
  Description of Artificial Sequence: Synthetic oligonucleotide
guagaaauaggaggccugg

SEQ ID NO: 5595 - RNA, 19 nt, Artificial Sequence
  Description of Artificial Sequence: Synthetic oligonucleotide
cguagaaauaggaggccug

SEQ ID NO: 5596 - RNA, 19 nt, Artificial Sequence
  Description of Artificial Sequence: Synthetic oligonucleotide
acguagaaauaggaggccu

SEQ ID NO: 5597 - RNA, 19 nt, Artificial Sequence
  Description of Artificial Sequence: Synthetic oligonucleotide
cacguagaaauaggaggcc

SEQ ID NO: 5598 - RNA, 19 nt, Artificial Sequence
  Description of Artificial Sequence: Synthetic oligonucleotide
ccacguagaaauaggaggc

SEQ ID NO: 5599 - RNA, 19 nt, Artificial Sequence
  Description of Artificial Sequence: Synthetic oligonucleotide
gccacguagaaauaggagg

SEQ ID NO: 5600 - RNA, 19 nt, Artificial Sequence
  Description of Artificial Sequence: Synthetic oligonucleotide
ugccacguagaaauaggag

SEQ ID NO: 5601 - RNA, 19 nt, Artificial Sequence
  Description of Artificial Sequence: Synthetic oligonucleotide
augccacguagaaauagga

SEQ ID NO: 5602 - RNA, 19 nt, Artificial Sequence
  Description of Artificial Sequence: Synthetic oligonucleotide
gaugccacguagaaauagg

SEQ ID NO: 5603 - RNA, 19 nt, Artificial Sequence
  Description of Artificial Sequence: Synthetic oligonucleotide
ggaugccacguagaaauag

SEQ ID NO: 5604 - RNA, 19 nt, Artificial Sequence
  Description of Artificial Sequence: Synthetic oligonucleotide
aggaugccacguagaaaua

SEQ ID NO: 5605 - RNA, 19 nt, Artificial Sequence
  Description of Artificial Sequence: Synthetic oligonucleotide
gaggaugccacguagaaau

SEQ ID NO: 5606 - RNA, 19 nt, Artificial Sequence
  Description of Artificial Sequence: Synthetic oligonucleotide
ugaggaugccacguagaaa

SEQ ID NO: 5607 - RNA, 19 nt, Artificial Sequence
  Description of Artificial Sequence: Synthetic oligonucleotide
gugaggaugccacguagaa

SEQ ID NO: 5608 - RNA, 19 nt, Artificial Sequence
  Description of Artificial Sequence: Synthetic oligonucleotide
agugaggaugccacguaga

SEQ ID NO: 5609 - RNA, 19 nt, Artificial Sequence
  Description of Artificial Sequence: Synthetic oligonucleotide
cagugaggaugccacguag

SEQ ID NO: 5610 - RNA, 19 nt, Artificial Sequence
  Description of Artificial Sequence: Synthetic oligonucleotide
ccagugaggaugccacgua

SEQ ID NO: 5611 - RNA, 19 nt, Artificial Sequence
  Description of Artificial Sequence: Synthetic oligonucleotide
uccagugaggaugccacgu

SEQ ID NO: 5612 - RNA, 19 nt, Artificial Sequence
  Description of Artificial Sequence: Synthetic oligonucleotide
guccagugaggaugccacg

SEQ ID NO: 5613 - RNA, 19 nt, Artificial Sequence
  Description of Artificial Sequence: Synthetic oligonucleotide
cguccagugaggaugccac

SEQ ID NO: 5614 - RNA, 19 nt, Artificial Sequence
  Description of Artificial Sequence: Synthetic oligonucleotide
gcguccagugaggaugcca

SEQ ID NO: 5615 - RNA, 19 nt, Artificial Sequence
  Description of Artificial Sequence: Synthetic oligonucleotide
ugcguccagugaggaugcc

SEQ ID NO: 5616 - RNA, 19 nt, Artificial Sequence
  Description of Artificial Sequence: Synthetic oligonucleotide
cugcguccagugaggaugc

SEQ ID NO: 5617 - RNA, 19 nt, Artificial Sequence
  Description of Artificial Sequence: Synthetic oligonucleotide
gcugcguccagugaggaug

SEQ ID NO: 5618 - RNA, 19 nt, Artificial Sequence
  Description of Artificial Sequence: Synthetic oligonucleotide
ggcugcguccagugaggau

SEQ ID NO: 5619 - RNA, 19 nt, Artificial Sequence
  Description of Artificial Sequence: Synthetic oligonucleotide
cggcugcguccagugagga

SEQ ID NO: 5620 - RNA, 19 nt, Artificial Sequence
  Description of Artificial Sequence: Synthetic oligonucleotide
acggcugcguccagugagg

SEQ ID NO: 5621 - RNA, 19 nt, Artificial Sequence
  Description of Artificial Sequence: Synthetic oligonucleotide
cacggcugcguccagugag

SEQ ID NO: 5622 - RNA, 19 nt, Artificial Sequence
  Description of Artificial Sequence: Synthetic oligonucleotide
ccacggcugcguccaguga

SEQ ID NO: 5623 - RNA, 19 nt, Artificial Sequence
  Description of Artificial Sequence: Synthetic oligonucleotide
gccacggcugcguccagug

SEQ ID NO: 5624 - RNA, 19 nt, Artificial Sequence
  Description of Artificial Sequence: Synthetic oligonucleotide
agccacggcugcguccagu

SEQ ID NO: 5625 - RNA, 19 nt, Artificial Sequence
  Description of Artificial Sequence: Synthetic oligonucleotide
cagccacggcugcguccag

SEQ ID NO: 5626 - RNA, 19 nt, Artificial Sequence
  Description of Artificial Sequence: Synthetic oligonucleotide
gcagccacggcugcgucca

SEQ ID NO: 5627 - RNA, 19 nt, Artificial Sequence
  Description of Artificial Sequence: Synthetic oligonucleotide
ggcagccacggcugcgucc

SEQ ID NO: 5628 - RNA, 19 nt, Artificial Sequence
  Description of Artificial Sequence: Synthetic oligonucleotide
uggcagccacggcugcguc

SEQ ID NO: 5629 - RNA, 19 nt, Artificial Sequence
  Description of Artificial Sequence: Synthetic oligonucleotide
cuggcagccacggcugcgu

SEQ ID NO: 5630 - RNA, 19 nt, Artificial Sequence
  Description of Artificial Sequence: Synthetic oligonucleotide
gcuggcagccacggcugcg

SEQ ID NO: 5631 - RNA, 19 nt, Artificial Sequence
  Description of Artificial Sequence: Synthetic oligonucleotide
agcuggcagccacggcugc

SEQ ID NO: 5632 - RNA, 19 nt, Artificial Sequence
  Description of Artificial Sequence: Synthetic oligonucleotide
aagcuggcagccacggcug

SEQ ID NO: 5633 - RNA, 19 nt, Artificial Sequence
  Description of Artificial Sequence: Synthetic oligonucleotide
gaagcuggcagccacggcu

SEQ ID NO: 5634 - RNA, 19 nt, Artificial Sequence
  Description of Artificial Sequence: Synthetic oligonucleotide
ugaagcuggcagccacggc

SEQ ID NO: 5635 - RNA, 19 nt, Artificial Sequence
  Description of Artificial Sequence: Synthetic oligonucleotide
cugaagcuggcagccacgg

SEQ ID NO: 5636 - RNA, 19 nt, Artificial Sequence
  Description of Artificial Sequence: Synthetic oligonucleotide
gcugaagcuggcagccacg

SEQ ID NO: 5637 - RNA, 19 nt, Artificial Sequence
  Description of Artificial Sequence: Synthetic oligonucleotide
ggcugaagcuggcagccac

SEQ ID NO: 5638 - RNA, 19 nt, Artificial Sequence
  Description of Artificial Sequence: Synthetic oligonucleotide
gggcugaagcuggcagcca

SEQ ID NO: 5639 - RNA, 19 nt, Artificial Sequence
  Description of Artificial Sequence: Synthetic oligonucleotide
ugggcugaagcuggcagcc

SEQ ID NO: 5640 - RNA, 19 nt, Artificial Sequence
  Description of Artificial Sequence: Synthetic oligonucleotide
gugggcugaagcuggcagc

SEQ ID NO: 5641 - RNA, 19 nt, Artificial Sequence
  Description of Artificial Sequence: Synthetic oligonucleotide
cgugggcugaagcuggcag

SEQ ID NO: 5642 - RNA, 19 nt, Artificial Sequence
  Description of Artificial Sequence: Synthetic oligonucleotide
gcgugggcugaagcuggca

SEQ ID NO: 5643 - RNA, 19 nt, Artificial Sequence
  Description of Artificial Sequence: Synthetic oligonucleotide
agcgugggcugaagcuggc

SEQ ID NO: 5644 - RNA, 19 nt, Artificial Sequence
  Description of Artificial Sequence: Synthetic oligonucleotide
gagcgugggcugaagcugg

SEQ ID NO: 5645 - RNA, 19 nt, Artificial Sequence
  Description of Artificial Sequence: Synthetic oligonucleotide
ugagcgugggcugaagcug

SEQ ID NO: 5646 - RNA, 19 nt, Artificial Sequence
  Description of Artificial Sequence: Synthetic oligonucleotide
cugagcgugggcugaagcu

SEQ ID NO: 5647 - RNA, 19 nt, Artificial Sequence
  Description of Artificial Sequence: Synthetic oligonucleotide
acugagcgugggcugaagc

SEQ ID NO: 5648 - RNA, 19 nt, Artificial Sequence
  Description of Artificial Sequence: Synthetic oligonucleotide
cacugagcgugggcugaag

SEQ ID NO: 5649 - RNA, 19 nt, Artificial Sequence
  Description of Artificial Sequence: Synthetic oligonucleotide
acacugagcgugggcugaa

SEQ ID NO: 5650 - RNA, 19 nt, Artificial Sequence
  Description of Artificial Sequence: Synthetic oligonucleotide
gacacugagcgugggcuga

SEQ ID NO: 5651 - RNA, 19 nt, Artificial Sequence
  Description of Artificial Sequence: Synthetic oligonucleotide
agacacugagcgugggcug

SEQ ID NO: 5652 - RNA, 19 nt, Artificial Sequence
  Description of Artificial Sequence: Synthetic oligonucleotide
uagacacugagcgugggcu

SEQ ID NO: 5653 - RNA, 19 nt, Artificial Sequence
  Description of Artificial Sequence: Synthetic oligonucleotide
auagacacugagcgugggc

SEQ ID NO: 5654 - RNA, 19 nt, Artificial Sequence
  Description of Artificial Sequence: Synthetic oligonucleotide
gauagacacugagcguggg

SEQ ID NO: 5655 - RNA, 19 nt, Artificial Sequence
  Description of Artificial Sequence: Synthetic oligonucleotide
ugauagacacugagcgugg

SEQ ID NO: 5656 - RNA, 19 nt, Artificial Sequence
  Description of Artificial Sequence: Synthetic oligonucleotide
cugauagacacugagcgug

SEQ ID NO: 5657 - RNA, 19 nt, Artificial Sequence
  Description of Artificial Sequence: Synthetic oligonucleotide
ccugauagacacugagcgu

SEQ ID NO: 5658 - RNA, 19 nt, Artificial Sequence
  Description of Artificial Sequence: Synthetic oligonucleotide
gccugauagacacugagcg

SEQ ID NO: 5659 - RNA, 19 nt, Artificial Sequence
  Description of Artificial Sequence: Synthetic oligonucleotide
cgccugauagacacugagc

SEQ ID NO: 5660 - RNA, 19 nt, Artificial Sequence
  Description of Artificial Sequence: Synthetic oligonucleotide
acgccugauagacacugag

SEQ ID NO: 5661 - RNA, 19 nt, Artificial Sequence
  Description of Artificial Sequence: Synthetic oligonucleotide
gacgccugauagacacuga

SEQ ID NO: 5662 - RNA, 19 nt, Artificial Sequence
  Description of Artificial Sequence: Synthetic oligonucleotide
agacgccugauagacacug

SEQ ID NO: 5663 - RNA, 19 nt, Artificial Sequence
  Description of Artificial Sequence: Synthetic oligonucleotide
gagacgccugauagacacu

SEQ ID NO: 5664 - RNA, 19 nt, Artificial Sequence
  Description of Artificial Sequence: Synthetic oligonucleotide
ugagacgccugauagacac

SEQ ID NO: 5665 - RNA, 19 nt, Artificial Sequence
  Description of Artificial Sequence: Synthetic oligonucleotide
uugagacgccugauagaca

SEQ ID NO: 5666 - RNA, 19 nt, Artificial Sequence
  Description of Artificial Sequence: Synthetic oligonucleotide
cuugagacgccugauagac

SEQ ID NO: 5667 - RNA, 19 nt, Artificial Sequence
  Description of Artificial Sequence: Synthetic oligonucleotide
ccuugagacgccugauaga

SEQ ID NO: 5668 - RNA, 19 nt, Artificial Sequence
  Description of Artificial Sequence: Synthetic oligonucleotide
gccuugagacgccugauag

SEQ ID NO: 5669 - RNA, 19 nt, Artificial Sequence
  Description of Artificial Sequence: Synthetic oligonucleotide
agccuugagacgccugaua

SEQ ID NO: 5670 - RNA, 19 nt, Artificial Sequence
  Description of Artificial Sequence: Synthetic oligonucleotide
cagccuugagacgccugau

SEQ ID NO: 5671 - RNA, 19 nt, Artificial Sequence
  Description of Artificial Sequence: Synthetic oligonucleotide
ucagccuugagacgccuga

SEQ ID NO: 5672 - RNA, 19 nt, Artificial Sequence
  Description of Artificial Sequence: Synthetic oligonucleotide
gucagccuugagacgccug

SEQ ID NO: 5673 - RNA, 19 nt, Artificial Sequence
  Description of Artificial Sequence: Synthetic oligonucleotide
cgucagccuugagacgccu

SEQ ID NO: 5674 - RNA, 19 nt, Artificial Sequence
  Description of Artificial Sequence: Synthetic oligonucleotide
gcgucagccuugagacgcc

SEQ ID NO: 5675 - RNA, 19 nt, Artificial Sequence
  Description of Artificial Sequence: Synthetic oligonucleotide
ggcgucagccuugagacgc

SEQ ID NO: 5676 - RNA, 19 nt, Artificial Sequence
  Description of Artificial Sequence: Synthetic oligonucleotide
aggcgucagccuugagacg

SEQ ID NO: 5677 - RNA, 19 nt, Artificial Sequence
  Description of Artificial Sequence: Synthetic oligonucleotide
gaggcgucagccuugagac

SEQ ID NO: 5678 - RNA, 19 nt, Artificial Sequence
  Description of Artificial Sequence: Synthetic oligonucleotide
cgaggcgucagccuugaga

SEQ ID NO: 5679 - RNA, 19 nt, Artificial Sequence
  Description of Artificial Sequence: Synthetic oligonucleotide
ccgaggcgucagccuugag

SEQ ID NO: 5680 - RNA, 19 nt, Artificial Sequence
  Description of Artificial Sequence: Synthetic oligonucleotide
cccgaggcgucagccuuga

SEQ ID NO: 5681 - RNA, 19 nt, Artificial Sequence
  Description of Artificial Sequence: Synthetic oligonucleotide
ucccgaggcgucagccuug

SEQ ID NO: 5682 - RNA, 19 nt, Artificial Sequence
  Description of Artificial Sequence: Synthetic oligonucleotide
aucccgaggcgucagccuu

SEQ ID NO: 5683 - RNA, 19 nt, Artificial Sequence
  Description of Artificial Sequence: Synthetic oligonucleotide
aaucccgaggcgucagccu

SEQ ID NO: 5684 - RNA, 19 nt, Artificial Sequence
  Description of Artificial Sequence: Synthetic oligonucleotide
gaaucccgaggcgucagcc

SEQ ID NO: 5685 - RNA, 19 nt, Artificial Sequence
  Description of Artificial Sequence: Synthetic oligonucleotide
cgaaucccgaggcgucagc

SEQ ID NO: 5686 - RNA, 19 nt, Artificial Sequence
  Description of Artificial Sequence: Synthetic oligonucleotide
gcgaaucccgaggcgucag

SEQ ID NO: 5687 - RNA, 19 nt, Artificial Sequence
  Description of Artificial Sequence: Synthetic oligonucleotide
ugcgaaucccgaggcguca

SEQ ID NO: 5688 - RNA, 19 nt, Artificial Sequence
  Description of Artificial Sequence: Synthetic oligonucleotide
gugcgaaucccgaggcguc

SEQ ID NO: 5689 - RNA, 19 nt, Artificial Sequence
  Description of Artificial Sequence: Synthetic oligonucleotide
ggugcgaaucccgaggcgu

SEQ ID NO: 5690 - RNA, 19 nt, Artificial Sequence
  Description of Artificial Sequence: Synthetic oligonucleotide
cggugcgaaucccgaggcg

SEQ ID NO: 5691 - RNA, 19 nt, Artificial Sequence
  Description of Artificial Sequence: Synthetic oligonucleotide
ccggugcgaaucccgaggc

SEQ ID NO: 5692 - RNA, 19 nt, Artificial Sequence
  Description of Artificial Sequence: Synthetic oligonucleotide
cccggugcgaaucccgagg

SEQ ID NO: 5693 - RNA, 19 nt, Artificial Sequence
  Description of Artificial Sequence: Synthetic oligonucleotide
gcccggugcgaaucccgag

SEQ ID NO: 5694 - RNA, 19 nt, Artificial Sequence
  Description of Artificial Sequence: Synthetic oligonucleotide
agcccggugcgaaucccga

SEQ ID NO: 5695 - RNA, 19 nt, Artificial Sequence
  Description of Artificial Sequence: Synthetic oligonucleotide
aagcccggugcgaaucccg

SEQ ID NO: 5696 - RNA, 19 nt, Artificial Sequence
  Description of Artificial Sequence: Synthetic oligonucleotide
aaagcccggugcgaauccc

SEQ ID NO: 5697 - RNA, 19 nt, Artificial Sequence
  Description of Artificial Sequence: Synthetic oligonucleotide
caaagcccggugcgaaucc

SEQ ID NO: 5698 - RNA, 19 nt, Artificial Sequence
  Description of Artificial Sequence: Synthetic oligonucleotide
acaaagcccggugcgaauc

SEQ ID NO: 5699 - RNA, 19 nt, Artificial Sequence
  Description of Artificial Sequence: Synthetic oligonucleotide
cacaaagcccggugcgaau

SEQ ID NO: 5700 - RNA, 19 nt, Artificial Sequence
  Description of Artificial Sequence: Synthetic oligonucleotide
ccacaaagcccggugcgaa

SEQ ID NO: 5701 - RNA, 19 nt, Artificial Sequence
  Description of Artificial Sequence: Synthetic oligonucleotide
gccacaaagcccggugcga

SEQ ID NO: 5702 - RNA, 19 nt, Artificial Sequence
  Description of Artificial Sequence: Synthetic oligonucleotide
cgccacaaagcccggugcg

SEQ ID NO: 5703 - RNA, 19 nt, Artificial Sequence
  Description of Artificial Sequence: Synthetic oligonucleotide
acgccacaaagcccggugc

SEQ ID NO: 5704 - RNA, 19 nt, Artificial Sequence
  Description of Artificial Sequence: Synthetic oligonucleotide
aacgccacaaagcccggug

SEQ ID NO: 5705 - RNA, 19 nt, Artificial Sequence
  Description of Artificial Sequence: Synthetic oligonucleotide
caacgccacaaagcccggu

SEQ ID NO: 5706 - RNA, 19 nt, Artificial Sequence
  Description of Artificial Sequence: Synthetic oligonucleotide
acaacgccacaaagcccgg

SEQ ID NO: 5707 - RNA, 19 nt, Artificial Sequence
  Description of Artificial Sequence: Synthetic oligonucleotide
gacaacgccacaaagcccg

SEQ ID NO: 5708 - RNA, 19 nt, Artificial Sequence
  Description of Artificial Sequence: Synthetic oligonucleotide
ugacaacgccacaaagccc

SEQ ID NO: 5709 - RNA, 19 nt, Artificial Sequence
  Description of Artificial Sequence: Synthetic oligonucleotide
cugacaacgccacaaagcc

SEQ ID NO: 5710 - RNA, 19 nt, Artificial Sequence
  Description of Artificial Sequence: Synthetic oligonucleotide
acugacaacgccacaaagc

SEQ ID NO: 5711 - RNA, 19 nt, Artificial Sequence
  Description of Artificial Sequence: Synthetic oligonucleotide
cacugacaacgccacaaag

SEQ ID NO: 5712 - RNA, 19 nt, Artificial Sequence
  Description of Artificial Sequence: Synthetic oligonucleotide
gcacugacaacgccacaaa

SEQ ID NO: 5713 - RNA, 19 nt, Artificial Sequence
  Description of Artificial Sequence: Synthetic oligonucleotide
agcacugacaacgccacaa

SEQ ID NO: 5714 - RNA, 19 nt, Artificial Sequence
  Description of Artificial Sequence: Synthetic oligonucleotide
cagcacugacaacgccaca

SEQ ID NO: 5715 - RNA, 19 nt, Artificial Sequence
  Description of Artificial Sequence: Synthetic oligonucleotide
gcagcacugacaacgccac

SEQ ID NO: 5716 - RNA, 19 nt, Artificial Sequence
  Description of Artificial Sequence: Synthetic oligonucleotide
ggcagcacugacaacgcca

SEQ ID NO: 5717 - RNA, 19 nt, Artificial Sequence
  Description of Artificial Sequence: Synthetic oligonucleotide
gggcagcacugacaacgcc

SEQ ID NO: 5718 - RNA, 19 nt, Artificial Sequence
  Description of Artificial Sequence: Synthetic oligonucleotide
ugggcagcacugacaacgc

SEQ ID NO: 5719 - RNA, 19 nt, Artificial Sequence
  Description of Artificial Sequence: Synthetic oligonucleotide
uugggcagcacugacaacg

SEQ ID NO: 5720 - RNA, 19 nt, Artificial Sequence
  Description of Artificial Sequence: Synthetic oligonucleotide
cuugggcagcacugacaac

SEQ ID NO: 5721 - RNA, 19 nt, Artificial Sequence
  Description of Artificial Sequence: Synthetic oligonucleotide
gcuugggcagcacugacaa

SEQ ID NO: 5722 - RNA, 19 nt, Artificial Sequence
  Description of Artificial Sequence: Synthetic oligonucleotide
ugcuugggcagcacugaca

SEQ ID NO: 5723 - RNA, 19 nt, Artificial Sequence
  Description of Artificial Sequence: Synthetic oligonucleotide
augcuugggcagcacugac

SEQ ID NO: 5724 - RNA, 19 nt, Artificial Sequence
  Description of Artificial Sequence: Synthetic oligonucleotide
gaugcuugggcagcacuga

SEQ ID NO: 5725 - RNA, 19 nt, Artificial Sequence
  Description of Artificial Sequence: Synthetic oligonucleotide
agaugcuugggcagcacug

SEQ ID NO: 5726 - RNA, 19 nt, Artificial Sequence
  Description of Artificial Sequence: Synthetic oligonucleotide
aagaugcuugggcagcacu

SEQ ID NO: 5727 - RNA, 19 nt, Artificial Sequence
  Description of Artificial Sequence: Synthetic oligonucleotide
caagaugcuugggcagcac

SEQ ID NO: 5728 - RNA, 19 nt, Artificial Sequence
  Description of Artificial Sequence: Synthetic oligonucleotide
acaagaugcuugggcagca

SEQ ID NO: 5729 - RNA, 19 nt, Artificial Sequence
  Description of Artificial Sequence: Synthetic oligonucleotide
gacaagaugcuugggcagc

SEQ ID NO: 5730 - RNA, 19 nt, Artificial Sequence
  Description of Artificial Sequence: Synthetic oligonucleotide
agacaagaugcuugggcag

SEQ ID NO: 5731 - RNA, 19 nt, Artificial Sequence
  Description of Artificial Sequence: Synthetic oligonucleotide
gagacaagaugcuugggca

SEQ ID NO: 5732 - RNA, 19 nt, Artificial Sequence
  Description of Artificial Sequence: Synthetic oligonucleotide
ggagacaagaugcuugggc

SEQ ID NO: 5733 - RNA, 19 nt, Artificial Sequence
  Description of Artificial Sequence: Synthetic oligonucleotide
aggagacaagaugcuuggg

SEQ ID NO: 5734 - RNA, 19 nt, Artificial Sequence
  Description of Artificial Sequence: Synthetic oligonucleotide
uaggagacaagaugcuugg

SEQ ID NO: 5735 - RNA, 19 nt, Artificial Sequence
  Description of Artificial Sequence: Synthetic oligonucleotide
guaggagacaagaugcuug

SEQ ID NO: 5736 - RNA, 19 nt, Artificial Sequence
  Description of Artificial Sequence: Synthetic oligonucleotide
uguaggagacaagaugcuu

SEQ ID NO: 5737 - RNA, 19 nt, Artificial Sequence
  Description of Artificial Sequence: Synthetic oligonucleotide
cuguaggagacaagaugcu

SEQ ID NO: 5738 - RNA, 19 nt, Artificial Sequence
  Description of Artificial Sequence: Synthetic oligonucleotide
acuguaggagacaagaugc

SEQ ID NO: 5739 - RNA, 19 nt, Artificial Sequence
  Description of Artificial Sequence: Synthetic oligonucleotide
uacuguaggagacaagaug

SEQ ID NO: 5740 - RNA, 19 nt, Artificial Sequence
  Description of Artificial Sequence: Synthetic oligonucleotide
auacuguaggagacaagau

SEQ ID NO: 5741 - RNA, 19 nt, Artificial Sequence
  Description of Artificial Sequence: Synthetic oligonucleotide
aauacuguaggagacaaga

SEQ ID NO: 5742 - RNA, 19 nt, Artificial Sequence
  Description of Artificial Sequence: Synthetic oligonucleotide
caauacuguaggagacaag

SEQ ID NO: 5743 - RNA, 19 nt, Artificial Sequence
  Description of Artificial Sequence: Synthetic oligonucleotide
ucaauacuguaggagacaa

SEQ ID NO: 5744 - RNA, 19 nt, Artificial Sequence
  Description of Artificial Sequence: Synthetic oligonucleotide
uucaauacuguaggagaca

SEQ ID NO: 5745 - RNA, 19 nt, Artificial Sequence
  Description of Artificial Sequence: Synthetic oligonucleotide
auucaauacuguaggagac

SEQ ID NO: 5746 - RNA, 19 nt, Artificial Sequence
  Description of Artificial Sequence: Synthetic oligonucleotide
uauucaauacuguaggaga

SEQ ID NO: 5747 - RNA, 19 nt, Artificial Sequence
  Description of Artificial Sequence: Synthetic oligonucleotide
guauucaauacuguaggag

SEQ ID NO: 5748 - RNA, 19 nt, Artificial Sequence
  Description of Artificial Sequence: Synthetic oligonucleotide
cguauucaauacuguagga

SEQ ID NO: 5749 - RNA, 19 nt, Artificial Sequence
  Description of Artificial Sequence: Synthetic oligonucleotide
acguauucaauacuguagg

SEQ ID NO: 5750 - RNA, 19 nt, Artificial Sequence
  Description of Artificial Sequence: Synthetic oligonucleotide
cacguauucaauacuguag

SEQ ID NO: 5751 - RNA, 19 nt, Artificial Sequence
  Description of Artificial Sequence: Synthetic oligonucleotide
gcacguauucaauacugua

SEQ ID NO: 5752 - RNA, 19 nt, Artificial Sequence
  Description of Artificial Sequence: Synthetic oligonucleotide
ugcacguauucaauacugu

SEQ ID NO: 5753 - RNA, 19 nt, Artificial Sequence
  Description of Artificial Sequence: Synthetic oligonucleotide
gugcacguauucaauacug

SEQ ID NO: 5754 - RNA, 19 nt, Artificial Sequence
  Description of Artificial Sequence: Synthetic oligonucleotide
ugugcacguauucaauacu

SEQ ID NO: 5755 - RNA, 19 nt, Artificial Sequence
  Description of Artificial Sequence: Synthetic oligonucleotide
cugugcacguauucaauac

SEQ ID NO: 5756 - RNA, 19 nt, Artificial Sequence
  Description of Artificial Sequence: Synthetic oligonucleotide
gcugugcacguauucaaua

SEQ ID NO: 5757 - RNA, 19 nt, Artificial Sequence
  Description of Artificial Sequence: Synthetic oligonucleotide
agcugugcacguauucaau

SEQ ID NO: 5758 - RNA, 19 nt, Artificial Sequence
  Description of Artificial Sequence: Synthetic oligonucleotide
aagcugugcacguauucaa

SEQ ID NO: 5759 - RNA, 19 nt, Artificial Sequence
  Description of Artificial Sequence: Synthetic oligonucleotide
gaagcugugcacguauuca

SEQ ID NO: 5760 - RNA, 19 nt, Artificial Sequence
  Description of Artificial Sequence: Synthetic oligonucleotide
ggaagcugugcacguauuc

SEQ ID NO: 5761 - RNA, 19 nt, Artificial Sequence
  Description of Artificial Sequence: Synthetic oligonucleotide
uggaagcugugcacguauu

SEQ ID NO: 5762 - RNA, 19 nt, Artificial Sequence
  Description of Artificial Sequence: Synthetic oligonucleotide
guggaagcugugcacguau

SEQ ID NO: 5763 - RNA, 19 nt, Artificial Sequence
  Description of Artificial Sequence: Synthetic oligonucleotide
uguggaagcugugcacgua

SEQ ID NO: 5764 - RNA, 19 nt, Artificial Sequence
  Description of Artificial Sequence: Synthetic oligonucleotide
guguggaagcugugcacgu

SEQ ID NO: 5765 - RNA, 19 nt, Artificial Sequence
  Description of Artificial Sequence: Synthetic oligonucleotide
cguguggaagcugugcacg

SEQ ID NO: 5766 - RNA, 19 nt, Artificial Sequence
  Description of Artificial Sequence: Synthetic oligonucleotide
ccguguggaagcugugcac

SEQ ID NO: 5767 - RNA, 19 nt, Artificial Sequence
  Description of Artificial Sequence: Synthetic oligonucleotide
cccguguggaagcugugca

SEQ ID NO: 5768 - RNA, 19 nt, Artificial Sequence
  Description of Artificial Sequence: Synthetic oligonucleotide
ucccguguggaagcugugc

SEQ ID NO: 5769 - RNA, 19 nt, Artificial Sequence
  Description of Artificial Sequence: Synthetic oligonucleotide
cucccguguggaagcugug

SEQ ID NO: 5770 - RNA, 19 nt, Artificial Sequence
  Description of Artificial Sequence: Synthetic oligonucleotide
gcucccguguggaagcugu

SEQ ID NO: 5771 - RNA, 19 nt, Artificial Sequence
  Description of Artificial Sequence: Synthetic oligonucleotide
ggcucccguguggaagcug

SEQ ID NO: 5772 - RNA, 19 nt, Artificial Sequence
  Description of Artificial Sequence: Synthetic oligonucleotide
aggcucccguguggaagcu

SEQ ID NO: 5773 - RNA, 19 nt, Artificial Sequence
  Description of Artificial Sequence: Synthetic oligonucleotide
aaggcucccguguggaagc

SEQ ID NO: 5774 - RNA, 19 nt, Artificial Sequence
  Description of Artificial Sequence: Synthetic oligonucleotide
gaaggcucccguguggaag

SEQ ID NO: 5775 - RNA, 19 nt, Artificial Sequence
  Description of Artificial Sequence: Synthetic oligonucleotide
cgaaggcucccguguggaa

SEQ ID NO: 5776 - RNA, 19 nt, Artificial Sequence
  Description of Artificial Sequence: Synthetic oligonucleotide
acgaaggcucccgugugga

SEQ ID NO: 5777 - RNA, 19 nt, Artificial Sequence
  Description of Artificial Sequence: Synthetic oligonucleotide
uacgaaggcucccgugugg

SEQ ID NO: 5778 - RNA, 19 nt, Artificial Sequence
  Description of Artificial Sequence: Synthetic oligonucleotide
auacgaaggcucccgugug

SEQ ID NO: 5779 - RNA, 19 nt, Artificial Sequence
  Description of Artificial Sequence: Synthetic oligonucleotide
uauacgaaggcucccgugu

SEQ ID NO: 5780 - RNA, 19 nt, Artificial Sequence
  Description of Artificial Sequence: Synthetic oligonucleotide
guauacgaaggcucccgug

SEQ ID NO: 5781 - RNA, 19 nt, Artificial Sequence
  Description of Artificial Sequence: Synthetic oligonucleotide
aguauacgaaggcucccgu

SEQ ID NO: 5782 - RNA, 19 nt, Artificial Sequence
  Description of Artificial Sequence: Synthetic oligonucleotide
aaguauacgaaggcucccg

SEQ ID NO: 5783 - RNA, 19 nt, Artificial Sequence
  Description of Artificial Sequence: Synthetic oligonucleotide
gaaguauacgaaggcuccc

SEQ ID NO: 5784 - RNA, 19 nt, Artificial Sequence
  Description of Artificial Sequence: Synthetic oligonucleotide
ggaaguauacgaaggcucc

SEQ ID NO: 5785 - RNA, 19 nt, Artificial Sequence
  Description of Artificial Sequence: Synthetic oligonucleotide
aggaaguauacgaaggcuc

SEQ ID NO: 5786 - RNA, 19 nt, Artificial Sequence
  Description of Artificial Sequence: Synthetic oligonucleotide
caggaaguauacgaaggcu

SEQ ID NO: 5787 - RNA, 19 nt, Artificial Sequence
  Description of Artificial Sequence: Synthetic oligonucleotide
ucaggaaguauacgaaggc

SEQ ID NO: 5788 - RNA, 19 nt, Artificial Sequence
  Description of Artificial Sequence: Synthetic oligonucleotide
gucaggaaguauacgaagg

SEQ ID NO: 5789 - RNA, 19 nt, Artificial Sequence
  Description of Artificial Sequence: Synthetic oligonucleotide
agucaggaaguauacgaag

SEQ ID NO: 5790 - RNA, 19 nt, Artificial Sequence
  Description of Artificial Sequence: Synthetic oligonucleotide
cagucaggaaguauacgaa

SEQ ID NO: 5791 - RNA, 19 nt, Artificial Sequence
  Description of Artificial Sequence: Synthetic oligonucleotide
acagucaggaaguauacga

SEQ ID NO: 5792 - RNA, 19 nt, Artificial Sequence
  Description of Artificial Sequence: Synthetic oligonucleotide
uacagucaggaaguauacg

SEQ ID NO: 5793 - RNA, 19 nt, Artificial Sequence
  Description of Artificial Sequence: Synthetic oligonucleotide
guacagucaggaaguauac

SEQ ID NO: 5794 - RNA, 19 nt, Artificial Sequence
  Description of Artificial Sequence: Synthetic oligonucleotide
uguacagucaggaaguaua

SEQ ID NO: 5795 - RNA, 19 nt, Artificial Sequence
  Description of Artificial Sequence: Synthetic oligonucleotide
cuguacagucaggaaguau

SEQ ID NO: 5796 - RNA, 19 nt, Artificial Sequence
  Description of Artificial Sequence: Synthetic oligonucleotide
gcuguacagucaggaagua

SEQ ID NO: 5797 - RNA, 19 nt, Artificial Sequence
  Description of Artificial Sequence: Synthetic oligonucleotide
ggcuguacagucaggaagu

SEQ ID NO: 5798 - RNA, 19 nt, Artificial Sequence
  Description of Artificial Sequence: Synthetic oligonucleotide
cggcuguacagucaggaag

SEQ ID NO: 5799 - RNA, 19 nt, Artificial Sequence
  Description of Artificial Sequence: Synthetic oligonucleotide
ccggcuguacagucaggaa

SEQ ID NO: 5800 - RNA, 19 nt, Artificial Sequence
  Description of Artificial Sequence: Synthetic oligonucleotide
gccggcuguacagucagga

SEQ ID NO: 5801 - RNA, 19 nt, Artificial Sequence
  Description of Artificial Sequence: Synthetic oligonucleotide
ggccggcuguacagucagg

SEQ ID NO: 5802 - RNA, 19 nt, Artificial Sequence
  Description of Artificial Sequence: Synthetic oligonucleotide
uggccggcuguacagucag

SEQ ID NO: 5803 - RNA, 19 nt, Artificial Sequence
  Description of Artificial Sequence: Synthetic oligonucleotide
cuggccggcuguacaguca

SEQ ID NO: 5804 - RNA, 19 nt, Artificial Sequence
  Description of Artificial Sequence: Synthetic oligonucleotide
gcuggccggcuguacaguc

SEQ ID NO: 5805 - RNA, 19 nt, Artificial Sequence
  Description of Artificial Sequence: Synthetic oligonucleotide
cgcuggccggcuguacagu

SEQ ID NO: 5806 - RNA, 19 nt, Artificial Sequence
  Description of Artificial Sequence: Synthetic oligonucleotide
acgcuggccggcuguacag

SEQ ID NO: 5807 - RNA, 19 nt, Artificial Sequence
  Description of Artificial Sequence: Synthetic oligonucleotide
cacgcuggccggcuguaca

SEQ ID NO: 5808 - RNA, 19 nt, Artificial Sequence
  Description of Artificial Sequence: Synthetic oligonucleotide
ucacgcuggccggcuguac

SEQ ID NO: 5809 - RNA, 19 nt, Artificial Sequence
  Description of Artificial Sequence: Synthetic oligonucleotide
gucacgcuggccggcugua

SEQ ID NO: 5810 - RNA, 19 nt, Artificial Sequence
  Description of Artificial Sequence: Synthetic oligonucleotide
ugucacgcuggccggcugu

SEQ ID NO: 5811 - RNA, 19 nt, Artificial Sequence
  Description of Artificial Sequence: Synthetic oligonucleotide
cugucacgcuggccggcug

SEQ ID NO: 5812 - RNA, 19 nt, Artificial Sequence
  Description of Artificial Sequence: Synthetic oligonucleotide
ucugucacgcuggccggcu

SEQ ID NO: 5813 - RNA, 19 nt, Artificial Sequence
  Description of Artificial Sequence: Synthetic oligonucleotide
aucugucacgcuggccggc

SEQ ID NO: 5814 - RNA, 19 nt, Artificial Sequence
  Description of Artificial Sequence: Synthetic oligonucleotide
caucugucacgcuggccgg

SEQ ID NO: 5815 - RNA, 19 nt, Artificial Sequence
  Description of Artificial Sequence: Synthetic oligonucleotide
ucaucugucacgcuggccg

SEQ ID NO: 5816 - RNA, 19 nt, Artificial Sequence
  Description of Artificial Sequence: Synthetic oligonucleotide
aucaucugucacgcuggcc

SEQ ID NO: 5817 - RNA, 19 nt, Artificial Sequence
  Description of Artificial Sequence: Synthetic oligonucleotide
gaucaucugucacgcuggc

SEQ ID NO: 5818 - RNA, 19 nt, Artificial Sequence
  Description of Artificial Sequence: Synthetic oligonucleotide
ggaucaucugucacgcugg

SEQ ID NO: 5819 - RNA, 19 nt, Artificial Sequence
  Description of Artificial Sequence: Synthetic oligonucleotide
aggaucaucugucacgcug

SEQ ID NO: 5820 - RNA, 19 nt, Artificial Sequence
  Description of Artificial Sequence: Synthetic oligonucleotide
uaggaucaucugucacgcu

SEQ ID NO: 5821 - RNA, 19 nt, Artificial Sequence
  Description of Artificial Sequence: Synthetic oligonucleotide
cuaggaucaucugucacgc

SEQ ID NO: 5822 - RNA, 19 nt, Artificial Sequence
  Description of Artificial Sequence: Synthetic oligonucleotide
acuaggaucaucugucacg

SEQ ID NO: 5823 - RNA, 19 nt, Artificial Sequence
  Description of Artificial Sequence: Synthetic oligonucleotide
cacuaggaucaucugucac

SEQ ID NO: 5824 - RNA, 19 nt, Artificial Sequence
  Description of Artificial Sequence: Synthetic oligonucleotide
gcacuaggaucaucuguca

SEQ ID NO: 5825 - RNA, 19 nt, Artificial Sequence
  Description of Artificial Sequence: Synthetic oligonucleotide
ggcacuaggaucaucuguc

SEQ ID NO: 5826 - RNA, 19 nt, Artificial Sequence
  Description of Artificial Sequence: Synthetic oligonucleotide
gggcacuaggaucaucugu

SEQ ID NO: 5827 - RNA, 19 nt, Artificial Sequence
  Description of Artificial Sequence: Synthetic oligonucleotide
agggcacuaggaucaucug

SEQ ID NO: 5828 - RNA, 19 nt, Artificial Sequence
  Description of Artificial Sequence: Synthetic oligonucleotide
cagggcacuaggaucaucu

SEQ ID NO: 5829 - RNA, 19 nt, Artificial Sequence
  Description of Artificial Sequence: Synthetic oligonucleotide
gcagggcacuaggaucauc

SEQ ID NO: 5830 - RNA, 19 nt, Artificial Sequence
  Description of Artificial Sequence: Synthetic oligonucleotide
ugcagggcacuaggaucau

SEQ ID NO: 5831 - RNA, 19 nt, Artificial Sequence
  Description of Artificial Sequence: Synthetic oligonucleotide
gugcagggcacuaggauca

SEQ ID NO: 5832 - RNA, 19 nt, Artificial Sequence
  Description of Artificial Sequence: Synthetic oligonucleotide
ugugcagggcacuaggauc

SEQ ID NO: 5833 - RNA, 19 nt, Artificial Sequence
  Description of Artificial Sequence: Synthetic oligonucleotide
gugugcagggcacuaggau

SEQ ID NO: 5834 - RNA, 19 nt, Artificial Sequence
  Description of Artificial Sequence: Synthetic oligonucleotide
ugugugcagggcacuagga

SEQ ID NO: 5835 - RNA, 19 nt, Artificial Sequence
  Description of Artificial Sequence: Synthetic oligonucleotide
gugugugcagggcacuagg

SEQ ID NO: 5836 - RNA, 19 nt, Artificial Sequence
  Description of Artificial Sequence: Synthetic oligonucleotide
cgugugugcagggcacuag

SEQ ID NO: 5837 - RNA, 19 nt, Artificial Sequence
  Description of Artificial Sequence: Synthetic oligonucleotide
gcgugugugcagggcacua

SEQ ID NO: 5838 - RNA, 19 nt, Artificial Sequence
  Description of Artificial Sequence: Synthetic oligonucleotide
ggcgugugugcagggcacu

SEQ ID NO: 5839 - RNA, 19 nt, Artificial Sequence
  Description of Artificial Sequence: Synthetic oligonucleotide
aggcgugugugcagggcac

SEQ ID NO: 5840 - RNA, 19 nt, Artificial Sequence
  Description of Artificial Sequence: Synthetic oligonucleotide
caggcgugugugcagggca

SEQ ID NO: 5841 - RNA, 19 nt, Artificial Sequence
  Description of Artificial Sequence: Synthetic oligonucleotide
ccaggcgugugugcagggc

SEQ ID NO: 5842 - RNA, 19 nt, Artificial Sequence
  Description of Artificial Sequence: Synthetic oligonucleotide
gccaggcgugugugcaggg

SEQ ID NO: 5843 - RNA, 19 nt, Artificial Sequence
  Description of Artificial Sequence: Synthetic oligonucleotide
ugccaggcgugugugcagg

SEQ ID NO: 5844 - RNA, 19 nt, Artificial Sequence
  Description of Artificial Sequence: Synthetic oligonucleotide
gugccaggcgugugugcag

SEQ ID NO: 5845 - RNA, 19 nt, Artificial Sequence
  Description of Artificial Sequence: Synthetic oligonucleotide
cgugccaggcgugugugca

SEQ ID NO: 5846 - RNA, 19 nt, Artificial Sequence
  Description of Artificial Sequence: Synthetic oligonucleotide
ccgugccaggcgugugugc

SEQ ID NO: 5847 - RNA, 19 nt, Artificial Sequence
  Description of Artificial Sequence: Synthetic oligonucleotide
gccgugccaggcgugugug

SEQ ID NO: 5848 - RNA, 19 nt, Artificial Sequence
  Description of Artificial Sequence: Synthetic oligonucleotide
agccgugccaggcgugugu

SEQ ID NO: 5849 - RNA, 19 nt, Artificial Sequence
  Description of Artificial Sequence: Synthetic oligonucleotide
aagccgugccaggcgugug

SEQ ID NO: 5850 - RNA, 19 nt, Artificial Sequence
  Description of Artificial Sequence: Synthetic oligonucleotide
uaagccgugccaggcgugu

SEQ ID NO: 5851 - RNA, 19 nt, Artificial Sequence
  Description of Artificial Sequence: Synthetic oligonucleotide
cuaagccgugccaggcgug

SEQ ID NO: 5852 - RNA, 19 nt, Artificial Sequence
  Description of Artificial Sequence: Synthetic oligonucleotide
gcuaagccgugccaggcgu

SEQ ID NO: 5853 - RNA, 19 nt, Artificial Sequence
  Description of Artificial Sequence: Synthetic oligonucleotide
cgcuaagccgugccaggcg

SEQ ID NO: 5854 - RNA, 19 nt, Artificial Sequence
  Description of Artificial Sequence: Synthetic oligonucleotide
gcgcuaagccgugccaggc

SEQ ID NO: 5855 - RNA, 19 nt, Artificial Sequence
  Description of Artificial Sequence: Synthetic oligonucleotide
ggcgcuaagccgugccagg

SEQ ID NO: 5856 - RNA, 19 nt, Artificial Sequence
  Description of Artificial Sequence: Synthetic oligonucleotide
uggcgcuaagccgugccag

SEQ ID NO: 5857 - RNA, 19 nt, Artificial Sequence
  Description of Artificial Sequence: Synthetic oligonucleotide
guggcgcuaagccgugcca

SEQ ID NO: 5858 - RNA, 19 nt, Artificial Sequence
  Description of Artificial Sequence: Synthetic oligonucleotide
aguggcgcuaagccgugcc

SEQ ID NO: 5859 - RNA, 19 nt, Artificial Sequence
  Description of Artificial Sequence: Synthetic oligonucleotide
caguggcgcuaagccgugc

SEQ ID NO: 5860 - RNA, 19 nt, Artificial Sequence
  Description of Artificial Sequence: Synthetic oligonucleotide
ucaguggcgcuaagccgug

SEQ ID NO: 5861 - RNA, 19 nt, Artificial Sequence
  Description of Artificial Sequence: Synthetic oligonucleotide
cucaguggcgcuaagccgu

SEQ ID NO: 5862 - RNA, 19 nt, Artificial Sequence
  Description of Artificial Sequence: Synthetic oligonucleotide
gcucaguggcgcuaagccg

SEQ ID NO: 5863 - RNA, 19 nt, Artificial Sequence
  Description of Artificial Sequence: Synthetic oligonucleotide
ggcucaguggcgcuaagcc

SEQ ID NO: 5864 - RNA, 19 nt, Artificial Sequence
  Description of Artificial Sequence: Synthetic oligonucleotide
uggcucaguggcgcuaagc

SEQ ID NO: 5865 - RNA, 19 nt, Artificial Sequence
  Description of Artificial Sequence: Synthetic oligonucleotide
cuggcucaguggcgcuaag

SEQ ID NO: 5866 - RNA, 19 nt, Artificial Sequence
  Description of Artificial Sequence: Synthetic oligonucleotide
ucuggcucaguggcgcuaa

SEQ ID NO: 5867 - RNA, 19 nt, Artificial Sequence
  Description of Artificial Sequence: Synthetic oligonucleotide
cucuggcucaguggcgcua

SEQ ID NO: 5868 - RNA, 19 nt, Artificial Sequence
  Description of Artificial Sequence: Synthetic oligonucleotide
acucuggcucaguggcgcu

SEQ ID NO: 5869 - RNA, 19 nt, Artificial Sequence
  Description of Artificial Sequence: Synthetic oligonucleotide
aacucuggcucaguggcgc

SEQ ID NO: 5870 - RNA, 19 nt, Artificial Sequence
  Description of Artificial Sequence: Synthetic oligonucleotide
caacucuggcucaguggcg

SEQ ID NO: 5871 - RNA, 19 nt, Artificial Sequence
  Description of Artificial Sequence: Synthetic oligonucleotide
ccaacucuggcucaguggc

SEQ ID NO: 5872 - RNA, 19 nt, Artificial Sequence
  Description of Artificial Sequence: Synthetic oligonucleotide
cccaacucuggcucagugg

SEQ ID NO: 5873 - RNA, 19 nt, Artificial Sequence
  Description of Artificial Sequence: Synthetic oligonucleotide
acccaacucuggcucagug

SEQ ID NO: 5874 - RNA, 19 nt, Artificial Sequence
  Description of Artificial Sequence: Synthetic oligonucleotide
cacccaacucuggcucagu

SEQ ID NO: 5875 - RNA, 19 nt, Artificial Sequence
  Description of Artificial Sequence: Synthetic oligonucleotide
ucacccaacucuggcucag

SEQ ID NO: 5876 - RNA, 19 nt, Artificial Sequence
  Description of Artificial Sequence: Synthetic oligonucleotide
gucacccaacucuggcuca

SEQ ID NO: 5877 - RNA, 19 nt, Artificial Sequence
  Description of Artificial Sequence: Synthetic oligonucleotide
agucacccaacucuggcuc

SEQ ID NO: 5878 - RNA, 19 nt, Artificial Sequence
  Description of Artificial Sequence: Synthetic oligonucleotide
uagucacccaacucuggcu

SEQ ID NO: 5879 - RNA, 19 nt, Artificial Sequence
  Description of Artificial Sequence: Synthetic oligonucleotide
auagucacccaacucuggc

SEQ ID NO: 5880 - RNA, 19 nt, Artificial Sequence
  Description of Artificial Sequence: Synthetic oligonucleotide
gauagucacccaacucugg

SEQ ID NO: 5881 - RNA, 19 nt, Artificial Sequence
  Description of Artificial Sequence: Synthetic oligonucleotide
cgauagucacccaacucug

SEQ ID NO: 5882 - RNA, 19 nt, Artificial Sequence
  Description of Artificial Sequence: Synthetic oligonucleotide
ccgauagucacccaacucu

SEQ ID NO: 5883 - RNA, 19 nt, Artificial Sequence
  Description of Artificial Sequence: Synthetic oligonucleotide
cccgauagucacccaacuc

SEQ ID NO: 5884 - RNA, 19 nt, Artificial Sequence
  Description of Artificial Sequence: Synthetic oligonucleotide
ucccgauagucacccaacu

SEQ ID NO: 5885 - RNA, 19 nt, Artificial Sequence
  Description of Artificial Sequence: Synthetic oligonucleotide
cucccgauagucacccaac

SEQ ID NO: 5886 - RNA, 19 nt, Artificial Sequence
  Description of Artificial Sequence: Synthetic oligonucleotide
gcucccgauagucacccaa

SEQ ID NO: 5887 - RNA, 19 nt, Artificial Sequence
  Description of Artificial Sequence: Synthetic oligonucleotide
agcucccgauagucaccca

SEQ ID NO: 5888 - RNA, 19 nt, Artificial Sequence
  Description of Artificial Sequence: Synthetic oligonucleotide
cagcucccgauagucaccc

SEQ ID NO: 5889 - RNA, 19 nt, Artificial Sequence
  Description of Artificial Sequence: Synthetic oligonucleotide
ccagcucccgauagucacc

SEQ ID NO: 5890 - RNA, 19 nt, Artificial Sequence
  Description of Artificial Sequence: Synthetic oligonucleotide
accagcucccgauagucac

SEQ ID NO: 5891 - RNA, 19 nt, Artificial Sequence
  Description of Artificial Sequence: Synthetic oligonucleotide
gaccagcucccgauaguca

SEQ ID NO: 5892 - RNA, 19 nt, Artificial Sequence
  Description of Artificial Sequence: Synthetic oligonucleotide
ggaccagcucccgauaguc

SEQ ID NO: 5893 - RNA, 19 nt, Artificial Sequence
  Description of Artificial Sequence: Synthetic oligonucleotide
aggaccagcucccgauagu

SEQ ID NO: 5894 - RNA, 19 nt, Artificial Sequence
  Description of Artificial Sequence: Synthetic oligonucleotide
gaggaccagcucccgauag

SEQ ID NO: 5895 - RNA, 19 nt, Artificial Sequence
  Description of Artificial Sequence: Synthetic oligonucleotide
cgaggaccagcucccgaua

SEQ ID NO: 5896 - RNA, 19 nt, Artificial Sequence
  Description of Artificial Sequence: Synthetic oligonucleotide
ucgaggaccagcucccgau

SEQ ID NO: 5897 - RNA, 19 nt, Artificial Sequence
  Description of Artificial Sequence: Synthetic oligonucleotide
gucgaggaccagcucccga

SEQ ID NO: 5898 - RNA, 19 nt, Artificial Sequence
  Description of Artificial Sequence: Synthetic oligonucleotide
agucgaggaccagcucccg

SEQ ID NO: 5899 - RNA, 19 nt, Artificial Sequence
  Description of Artificial Sequence: Synthetic oligonucleotide
cagucgaggaccagcuccc

SEQ ID NO: 5900 - RNA, 19 nt, Artificial Sequence
  Description of Artificial Sequence: Synthetic oligonucleotide
gcagucgaggaccagcucc

SEQ ID NO: 5901 - RNA, 19 nt, Artificial Sequence
  Description of Artificial Sequence: Synthetic oligonucleotide
ugcagucgaggaccagcuc

SEQ ID NO: 5902 - RNA, 19 nt, Artificial Sequence
  Description of Artificial Sequence: Synthetic oligonucleotide
cugcagucgaggaccagcu

SEQ ID NO: 5903 - RNA, 19 nt, Artificial Sequence
  Description of Artificial Sequence: Synthetic oligonucleotide
ucugcagucgaggaccagc

SEQ ID NO: 5904 - RNA, 19 nt, Artificial Sequence
  Description of Artificial Sequence: Synthetic oligonucleotide
aucugcagucgaggaccag

SEQ ID NO: 5905 - RNA, 19 nt, Artificial Sequence
  Description of Artificial Sequence: Synthetic oligonucleotide
aaucugcagucgaggacca

SEQ ID NO: 5906 - RNA, 19 nt, Artificial Sequence
  Description of Artificial Sequence: Synthetic oligonucleotide
aaaucugcagucgaggacc

SEQ ID NO: 5907 - RNA, 19 nt, Artificial Sequence
  Description of Artificial Sequence: Synthetic oligonucleotide
caaaucugcagucgaggac

SEQ ID NO: 5908 - RNA, 19 nt, Artificial Sequence
  Description of Artificial Sequence: Synthetic oligonucleotide
gcaaaucugcagucgagga

SEQ ID NO: 5909 - RNA, 19 nt, Artificial Sequence
  Description of Artificial Sequence: Synthetic oligonucleotide
agcaaaucugcagucgagg

SEQ ID NO: 5910 - RNA, 19 nt, Artificial Sequence
  Description of Artificial Sequence: Synthetic oligonucleotide
gagcaaaucugcagucgag

SEQ ID NO: 5911 - RNA, 19 nt, Artificial Sequence
  Description of Artificial Sequence: Synthetic oligonucleotide
ggagcaaaucugcagucga

SEQ ID NO: 5912 - RNA, 19 nt, Artificial Sequence
  Description of Artificial Sequence: Synthetic oligonucleotide
uggagcaaaucugcagucg

SEQ ID NO: 5913 - RNA, 19 nt, Artificial Sequence
  Description of Artificial Sequence: Synthetic oligonucleotide
uuggagcaaaucugcaguc

SEQ ID NO: 5914 - RNA, 19 nt, Artificial Sequence
  Description of Artificial Sequence: Synthetic oligonucleotide
uuuggagcaaaucugcagu

SEQ ID NO: 5915 - RNA, 19 nt, Artificial Sequence
  Description of Artificial Sequence: Synthetic oligonucleotide
uuuuggagcaaaucugcag

SEQ ID NO: 5916 - RNA, 19 nt, Artificial Sequence
  Description of Artificial Sequence: Synthetic oligonucleotide
guuuuggagcaaaucugca

SEQ ID NO: 5917 - RNA, 19 nt, Artificial Sequence
  Description of Artificial Sequence: Synthetic oligonucleotide
cguuuuggagcaaaucugc

SEQ ID NO: 5918 - RNA, 19 nt, Artificial Sequence
  Description of Artificial Sequence: Synthetic oligonucleotide
gcguuuuggagcaaaucug

SEQ ID NO: 5919 - RNA, 19 nt, Artificial Sequence
  Description of Artificial Sequence: Synthetic oligonucleotide
ugcguuuuggagcaaaucu

SEQ ID NO: 5920 - RNA, 19 nt, Artificial Sequence
  Description of Artificial Sequence: Synthetic oligonucleotide
cugcguuuuggagcaaauc

SEQ ID NO: 5921 - RNA, 19 nt, Artificial Sequence
  Description of Artificial Sequence: Synthetic oligonucleotide
ccugcguuuuggagcaaau

SEQ ID NO: 5922 - RNA, 19 nt, Artificial Sequence
  Description of Artificial Sequence: Synthetic oligonucleotide
gccugcguuuuggagcaaa

SEQ ID NO: 5923 - RNA, 19 nt, Artificial Sequence
  Description of Artificial Sequence: Synthetic oligonucleotide
cgccugcguuuuggagcaa

SEQ ID NO: 5924 - RNA, 19 nt, Artificial Sequence
  Description of Artificial Sequence: Synthetic oligonucleotide
gcgccugcguuuuggagca

SEQ ID NO: 5925 - RNA, 19 nt, Artificial Sequence
  Description of Artificial Sequence: Synthetic oligonucleotide
ggcgccugcguuuuggagc

SEQ ID NO: 5926 - RNA, 19 nt, Artificial Sequence
  Description of Artificial Sequence: Synthetic oligonucleotide
cggcgccugcguuuuggag

SEQ ID NO: 5927 - RNA, 19 nt, Artificial Sequence
  Description of Artificial Sequence: Synthetic oligonucleotide
ccggcgccugcguuuugga

SEQ ID NO: 5928 - RNA, 19 nt, Artificial Sequence
  Description of Artificial Sequence: Synthetic oligonucleotide
cccggcgccugcguuuugg

SEQ ID NO: 5929 - RNA, 19 nt, Artificial Sequence
  Description of Artificial Sequence: Synthetic oligonucleotide
ccccggcgccugcguuuug

SEQ ID NO: 5930 - RNA, 19 nt, Artificial Sequence
  Description of Artificial Sequence: Synthetic oligonucleotide
cccccggcgccugcguuuu

SEQ ID NO: 5931 - RNA, 19 nt, Artificial Sequence
  Description of Artificial Sequence: Synthetic oligonucleotide
ccccccggcgccugcguuu

SEQ ID NO: 5932 - RNA, 19 nt, Artificial Sequence
  Description of Artificial Sequence: Synthetic oligonucleotide
gccccccggcgccugcguu

SEQ ID NO: 5933 - RNA, 19 nt, Artificial Sequence
  Description of Artificial Sequence: Synthetic oligonucleotide
ggccccccggcgccugcgu

SEQ ID NO: 5934 - RNA, 19 nt, Artificial Sequence
  Description of Artificial Sequence: Synthetic oligonucleotide
gggccccccggcgccugcg

SEQ ID NO: 5935 - RNA, 19 nt, Artificial Sequence
  Description of Artificial Sequence: Synthetic oligonucleotide
ggggccccccggcgccugc

SEQ ID NO: 5936 - RNA, 19 nt, Artificial Sequence
  Description of Artificial Sequence: Synthetic oligonucleotide
uggggccccccggcgccug

SEQ ID NO: 5937 - RNA, 19 nt, Artificial Sequence
  Description of Artificial Sequence: Synthetic oligonucleotide
cuggggccccccggcgccu

SEQ ID NO: 5938 - RNA, 19 nt, Artificial Sequence
  Description of Artificial Sequence: Synthetic oligonucleotide
ucuggggccccccggcgcc

SEQ ID NO: 5939 - RNA, 19 nt, Artificial Sequence
  Description of Artificial Sequence: Synthetic oligonucleotide
uucuggggccccccggcgc

SEQ ID NO: 5940 - RNA, 19 nt, Artificial Sequence
  Description of Artificial Sequence: Synthetic oligonucleotide
cuucuggggccccccggcg

SEQ ID NO: 5941 - RNA, 19 nt, Artificial Sequence
  Description of Artificial Sequence: Synthetic oligonucleotide
ccuucuggggccccccggc

SEQ ID NO: 5942 - RNA, 19 nt, Artificial Sequence
  Description of Artificial Sequence: Synthetic oligonucleotide
gccuucuggggccccccgg

SEQ ID NO: 5943 - RNA, 19 nt, Artificial Sequence
  Description of Artificial Sequence: Synthetic oligonucleotide
cgccuucuggggccccccg

SEQ ID NO: 5944 - RNA, 19 nt, Artificial Sequence
  Description of Artificial Sequence: Synthetic oligonucleotide
ccgccuucuggggcccccc

SEQ ID NO: 5945 - RNA, 19 nt, Artificial Sequence
  Description of Artificial Sequence: Synthetic oligonucleotide
uccgccuucuggggccccc

SEQ ID NO: 5946 - RNA, 19 nt, Artificial Sequence
  Description of Artificial Sequence: Synthetic oligonucleotide
guccgccuucuggggcccc

SEQ ID NO: 5947 - RNA, 19 nt, Artificial Sequence
  Description of Artificial Sequence: Synthetic oligonucleotide
uguccgccuucuggggccc

SEQ ID NO: 5948 - RNA, 19 nt, Artificial Sequence
  Description of Artificial Sequence: Synthetic oligonucleotide
cuguccgccuucuggggcc

SEQ ID NO: 5949 - RNA, 19 nt, Artificial Sequence
  Description of Artificial Sequence: Synthetic oligonucleotide
gcuguccgccuucuggggc

SEQ ID NO: 5950 - RNA, 19 nt, Artificial Sequence
  Description of Artificial Sequence: Synthetic oligonucleotide
ggcuguccgccuucugggg

SEQ ID NO: 5951 - RNA, 19 nt, Artificial Sequence
  Description of Artificial Sequence: Synthetic oligonucleotide
gggcuguccgccuucuggg

SEQ ID NO: 5952 - RNA, 19 nt, Artificial Sequence
  Description of Artificial Sequence: Synthetic oligonucleotide
agggcuguccgccuucugg

SEQ ID NO: 5953 - RNA, 19 nt, Artificial Sequence
  Description of Artificial Sequence: Synthetic oligonucleotide
uagggcuguccgccuucug

SEQ ID NO: 5954 - RNA, 19 nt, Artificial Sequence
  Description of Artificial Sequence: Synthetic oligonucleotide
guagggcuguccgccuucu

SEQ ID NO: 5955 - RNA, 19 nt, Artificial Sequence
  Description of Artificial Sequence: Synthetic oligonucleotide
gguagggcuguccgccuuc

SEQ ID NO: 5956 - RNA, 19 nt, Artificial Sequence
  Description of Artificial Sequence: Synthetic oligonucleotide
ggguagggcuguccgccuu

SEQ ID NO: 5957 - RNA, 19 nt, Artificial Sequence
  Description of Artificial Sequence: Synthetic oligonucleotide
aggguagggcuguccgccu

SEQ ID NO: 5958 - RNA, 19 nt, Artificial Sequence
  Description of Artificial Sequence: Synthetic oligonucleotide
caggguagggcuguccgcc

SEQ ID NO: 5959 - RNA, 19 nt, Artificial Sequence
  Description of Artificial Sequence: Synthetic oligonucleotide
acaggguagggcuguccgc

SEQ ID NO: 5960 - RNA, 19 nt, Artificial Sequence
  Description of Artificial Sequence: Synthetic oligonucleotide
cacaggguagggcuguccg

SEQ ID NO: 5961 - RNA, 19 nt, Artificial Sequence
  Description of Artificial Sequence: Synthetic oligonucleotide
gcacaggguagggcugucc

SEQ ID NO: 5962 - RNA, 19 nt, Artificial Sequence
  Description of Artificial Sequence: Synthetic oligonucleotide
agcacaggguagggcuguc

SEQ ID NO: 5963 - RNA, 19 nt, Artificial Sequence
  Description of Artificial Sequence: Synthetic oligonucleotide
cagcacaggguagggcugu

SEQ ID NO: 5964 - RNA, 19 nt, Artificial Sequence
  Description of Artificial Sequence: Synthetic oligonucleotide
gcagcacaggguagggcug

SEQ ID NO: 5965 - RNA, 19 nt, Artificial Sequence
  Description of Artificial Sequence: Synthetic oligonucleotide
cgcagcacaggguagggcu

SEQ ID NO: 5966 - RNA, 19 nt, Artificial Sequence
  Description of Artificial Sequence: Synthetic oligonucleotide
ccgcagcacaggguagggc

SEQ ID NO: 5967 - RNA, 19 nt, Artificial Sequence
  Description of Artificial Sequence: Synthetic oligonucleotide
cccgcagcacaggguaggg

SEQ ID NO: 5968 - RNA, 19 nt, Artificial Sequence
  Description of Artificial Sequence: Synthetic oligonucleotide
acccgcagcacaggguagg

SEQ ID NO: 5969 - RNA, 19 nt, Artificial Sequence
  Description of Artificial Sequence: Synthetic oligonucleotide
cacccgcagcacaggguag

SEQ ID NO: 5970 - RNA, 19 nt, Artificial Sequence
  Description of Artificial Sequence: Synthetic oligonucleotide
ccacccgcagcacagggua

SEQ ID NO: 5971 - RNA, 19 nt, Artificial Sequence
  Description of Artificial Sequence: Synthetic oligonucleotide
gccacccgcagcacagggu

SEQ ID NO: 5972 - RNA, 19 nt, Artificial Sequence
  Description of Artificial Sequence: Synthetic oligonucleotide
ggccacccgcagcacaggg

SEQ ID NO: 5973 - RNA, 19 nt, Artificial Sequence
  Description of Artificial Sequence: Synthetic oligonucleotide
gggccacccgcagcacagg

SEQ ID NO: 5974 - RNA, 19 nt, Artificial Sequence
  Description of Artificial Sequence: Synthetic oligonucleotide
ugggccacccgcagcacag

SEQ ID NO: 5975 - RNA, 19 nt, Artificial Sequence
  Description of Artificial Sequence: Synthetic oligonucleotide
gugggccacccgcagcaca

SEQ ID NO: 5976 - RNA, 19 nt, Artificial Sequence
  Description of Artificial Sequence: Synthetic oligonucleotide
agugggccacccgcagcac

SEQ ID NO: 5977 - RNA, 19 nt, Artificial Sequence
  Description of Artificial Sequence: Synthetic oligonucleotide
gagugggccacccgcagca

SEQ ID NO: 5978 - RNA, 19 nt, Artificial Sequence
  Description of Artificial Sequence: Synthetic oligonucleotide
ggagugggccacccgcagc

SEQ ID NO: 5979 - RNA, 19 nt, Artificial Sequence
  Description of Artificial Sequence: Synthetic oligonucleotide
cggagugggccacccgcag

SEQ ID NO: 5980 - RNA, 19 nt, Artificial Sequence
  Description of Artificial Sequence: Synthetic oligonucleotide
gcggagugggccacccgca

SEQ ID NO: 5981 - RNA, 19 nt, Artificial Sequence
  Description of Artificial Sequence: Synthetic oligonucleotide
agcggagugggccacccgc

SEQ ID NO: 5982 - RNA, 19 nt, Artificial Sequence
  Description of Artificial Sequence: Synthetic oligonucleotide
gagcggagugggccacccg

SEQ ID NO: 5983 - RNA, 19 nt, Artificial Sequence
  Description of Artificial Sequence: Synthetic oligonucleotide
ggagcggagugggccaccc

SEQ ID NO: 5984 - RNA, 19 nt, Artificial Sequence
  Description of Artificial Sequence: Synthetic oligonucleotide
uggagcggagugggccacc

SEQ ID NO: 5985 - RNA, 19 nt, Artificial Sequence
  Description of Artificial Sequence: Synthetic oligonucleotide
cuggagcggagugggccac

SEQ ID NO: 5986 - RNA, 19 nt, Artificial Sequence
  Description of Artificial Sequence: Synthetic oligonucleotide
acuggagcggagugggcca

SEQ ID NO: 5987 - RNA, 19 nt, Artificial Sequence
  Description of Artificial Sequence: Synthetic oligonucleotide
cacuggagcggagugggcc

SEQ ID NO: 5988 - RNA, 19 nt, Artificial Sequence
  Description of Artificial Sequence: Synthetic oligonucleotide
ccacuggagcggagugggc

SEQ ID NO: 5989 - RNA, 19 nt, Artificial Sequence
  Description of Artificial Sequence: Synthetic oligonucleotide
cccacuggagcggaguggg

SEQ ID NO: 5990 - RNA, 19 nt, Artificial Sequence
  Description of Artificial Sequence: Synthetic oligonucleotide
acccacuggagcggagugg

SEQ ID NO: 5991 - RNA, 19 nt, Artificial Sequence
  Description of Artificial Sequence: Synthetic oligonucleotide
cacccacuggagcggagug

SEQ ID NO: 5992 - RNA, 19 nt, Artificial Sequence
  Description of Artificial Sequence: Synthetic oligonucleotide
gcacccacuggagcggagu

SEQ ID NO: 5993 - RNA, 19 nt, Artificial Sequence
  Description of Artificial Sequence: Synthetic oligonucleotide
ggcacccacuggagcggag

SEQ ID NO: 5994 - RNA, 19 nt, Artificial Sequence
  Description of Artificial Sequence: Synthetic oligonucleotide
gggcacccacuggagcgga

SEQ ID NO: 5995 - RNA, 19 nt, Artificial Sequence
  Description of Artificial Sequence: Synthetic oligonucleotide
ugggcacccacuggagcgg

SEQ ID NO: 5996 - RNA, 19 nt, Artificial Sequence
  Description of Artificial Sequence: Synthetic oligonucleotide
uugggcacccacuggagcg

SEQ ID NO: 5997 - RNA, 19 nt, Artificial Sequence
  Description of Artificial Sequence: Synthetic oligonucleotide
guugggcacccacuggagc

SEQ ID NO: 5998 - RNA, 19 nt, Artificial Sequence
  Description of Artificial Sequence: Synthetic oligonucleotide
aguugggcacccacuggag

SEQ ID NO: 5999 - RNA, 19 nt, Artificial Sequence
  Description of Artificial Sequence: Synthetic oligonucleotide
aaguugggcacccacugga

SEQ ID NO: 6000 - RNA, 19 nt, Artificial Sequence
  Description of Artificial Sequence: Synthetic oligonucleotide
caaguugggcacccacugg

SEQ ID NO: 6001 - RNA, 19 nt, Artificial Sequence
  Description of Artificial Sequence: Synthetic oligonucleotide
gcaaguugggcacccacug

SEQ ID NO: 6002 - RNA, 19 nt, Artificial Sequence
  Description of Artificial Sequence: Synthetic oligonucleotide
ggcaaguugggcacccacu

SEQ ID NO: 6003 - RNA, 19 nt, Artificial Sequence
  Description of Artificial Sequence: Synthetic oligonucleotide
uggcaaguugggcacccac

SEQ ID NO: 6004 - RNA, 19 nt, Artificial Sequence
  Description of Artificial Sequence: Synthetic oligonucleotide
guggcaaguugggcaccca

SEQ ID NO: 6005 - RNA, 19 nt, Artificial Sequence
  Description of Artificial Sequence: Synthetic oligonucleotide
aguggcaaguugggcaccc

SEQ ID NO: 6006 - RNA, 19 nt, Artificial Sequence
  Description of Artificial Sequence: Synthetic oligonucleotide
caguggcaaguugggcacc

SEQ ID NO: 6007 - RNA, 19 nt, Artificial Sequence
  Description of Artificial Sequence: Synthetic oligonucleotide
ucaguggcaaguugggcac

SEQ ID NO: 6008 - RNA, 19 nt, Artificial Sequence
  Description of Artificial Sequence: Synthetic oligonucleotide
cucaguggcaaguugggca

SEQ ID NO: 6009 - RNA, 19 nt, Artificial Sequence
  Description of Artificial Sequence: Synthetic oligonucleotide
gcucaguggcaaguugggc

SEQ ID NO: 6010 - RNA, 19 nt, Artificial Sequence
  Description of Artificial Sequence: Synthetic oligonucleotide
agcucaguggcaaguuggg

SEQ ID NO: 6011 - RNA, 19 nt, Artificial Sequence
  Description of Artificial Sequence: Synthetic oligonucleotide
cagcucaguggcaaguugg

SEQ ID NO: 6012 - RNA, 19 nt, Artificial Sequence
  Description of Artificial Sequence: Synthetic oligonucleotide
ucagcucaguggcaaguug

SEQ ID NO: 6013 - RNA, 19 nt, Artificial Sequence
  Description of Artificial Sequence: Synthetic oligonucleotide
cucagcucaguggcaaguu

SEQ ID NO: 6014 - RNA, 19 nt, Artificial Sequence
  Description of Artificial Sequence: Synthetic oligonucleotide
gcucagcucaguggcaagu

SEQ ID NO: 6015 - RNA, 19 nt, Artificial Sequence
  Description of Artificial Sequence: Synthetic oligonucleotide
ugcucagcucaguggcaag

SEQ ID NO: 6016 - RNA, 19 nt, Artificial Sequence
  Description of Artificial Sequence: Synthetic oligonucleotide
augcucagcucaguggcaa

SEQ ID NO: 6017 - RNA, 19 nt, Artificial Sequence
  Description of Artificial Sequence: Synthetic oligonucleotide
gaugcucagcucaguggca

SEQ ID NO: 6018 - RNA, 19 nt, Artificial Sequence
  Description of Artificial Sequence: Synthetic oligonucleotide
cgaugcucagcucaguggc

SEQ ID NO: 6019 - RNA, 19 nt, Artificial Sequence
  Description of Artificial Sequence: Synthetic oligonucleotide
gcgaugcucagcucagugg

SEQ ID NO: 6020 - RNA, 19 nt, Artificial Sequence
  Description of Artificial Sequence: Synthetic oligonucleotide
ggcgaugcucagcucagug

SEQ ID NO: 6021 - RNA, 19 nt, Artificial Sequence
  Description of Artificial Sequence: Synthetic oligonucleotide
cggcgaugcucagcucagu

SEQ ID NO: 6022 - RNA, 19 nt, Artificial Sequence
  Description of Artificial Sequence: Synthetic oligonucleotide
ucggcgaugcucagcucag

SEQ ID NO: 6023 - RNA, 19 nt, Artificial Sequence
  Description of Artificial Sequence: Synthetic oligonucleotide
cucggcgaugcucagcuca

SEQ ID NO: 6024 - RNA, 19 nt, Artificial Sequence
  Description of Artificial Sequence: Synthetic oligonucleotide
ccucggcgaugcucagcuc

SEQ ID NO: 6025 - RNA, 19 nt, Artificial Sequence
  Description of Artificial Sequence: Synthetic oligonucleotide
cccucggcgaugcucagcu

SEQ ID NO: 6026 - RNA, 19 nt, Artificial Sequence
  Description of Artificial Sequence: Synthetic oligonucleotide
gcccucggcgaugcucagc

SEQ ID NO: 6027 - RNA, 19 nt, Artificial Sequence
  Description of Artificial Sequence: Synthetic oligonucleotide
ggcccucggcgaugcucag

SEQ ID NO: 6028 - RNA, 19 nt, Artificial Sequence
  Description of Artificial Sequence: Synthetic oligonucleotide
uggcccucggcgaugcuca

SEQ ID NO: 6029 - RNA, 19 nt, Artificial Sequence
  Description of Artificial Sequence: Synthetic oligonucleotide
cuggcccucggcgaugcuc

SEQ ID NO: 6030 - RNA, 19 nt, Artificial Sequence
  Description of Artificial Sequence: Synthetic oligonucleotide
ccuggcccucggcgaugcu

SEQ ID NO: 6031 - RNA, 19 nt, Artificial Sequence
  Description of Artificial Sequence: Synthetic oligonucleotide
uccuggcccucggcgaugc

SEQ ID NO: 6032 - RNA, 19 nt, Artificial Sequence
  Description of Artificial Sequence: Synthetic oligonucleotide
uuccuggcccucggcgaug

SEQ ID NO: 6033 - RNA, 19 nt, Artificial Sequence
  Description of Artificial Sequence: Synthetic oligonucleotide
cuuccuggcccucggcgau

SEQ ID NO: 6034 - RNA, 19 nt, Artificial Sequence
  Description of Artificial Sequence: Synthetic oligonucleotide
acuuccuggcccucggcga

SEQ ID NO: 6035 - RNA, 19 nt, Artificial Sequence
  Description of Artificial Sequence: Synthetic oligonucleotide
uacuuccuggcccucggcg

SEQ ID NO: 6036 - RNA, 19 nt, Artificial Sequence
  Description of Artificial Sequence: Synthetic oligonucleotide
guacuuccuggcccucggc

SEQ ID NO: 6037 - RNA, 19 nt, Artificial Sequence
  Description of Artificial Sequence: Synthetic oligonucleotide
aguacuuccuggcccucgg

SEQ ID NO: 6038 - RNA, 19 nt, Artificial Sequence
  Description of Artificial Sequence: Synthetic oligonucleotide
uaguacuuccuggcccucg

SEQ ID NO: 6039 - RNA, 19 nt, Artificial Sequence
  Description of Artificial Sequence: Synthetic oligonucleotide
auaguacuuccuggcccuc

SEQ ID NO: 6040 - RNA, 19 nt, Artificial Sequence
  Description of Artificial Sequence: Synthetic oligonucleotide
aauaguacuuccuggcccu

SEQ ID NO: 6041 - RNA, 19 nt, Artificial Sequence
  Description of Artificial Sequence: Synthetic oligonucleotide
aaauaguacuuccuggccc

SEQ ID NO: 6042 - RNA, 19 nt, Artificial Sequence
  Description of Artificial Sequence: Synthetic oligonucleotide
caaauaguacuuccuggcc

SEQ ID NO: 6043 - RNA, 19 nt, Artificial Sequence
  Description of Artificial Sequence: Synthetic oligonucleotide
ccaaauaguacuuccuggc

SEQ ID NO: 6044 - RNA, 19 nt, Artificial Sequence
  Description of Artificial Sequence: Synthetic oligonucleotide
cccaaauaguacuuccugg

SEQ ID NO: 6045 - RNA, 19 nt, Artificial Sequence
  Description of Artificial Sequence: Synthetic oligonucleotide
ccccaaauaguacuuccug

SEQ ID NO: 6046 - RNA, 19 nt, Artificial Sequence
  Description of Artificial Sequence: Synthetic oligonucleotide
accccaaauaguacuuccu

SEQ ID NO: 6047 - RNA, 19 nt, Artificial Sequence
  Description of Artificial Sequence: Synthetic oligonucleotide
gaccccaaauaguacuucc

SEQ ID NO: 6048 - RNA, 19 nt, Artificial Sequence
  Description of Artificial Sequence: Synthetic oligonucleotide
agaccccaaauaguacuuc

SEQ ID NO: 6049 - RNA, 19 nt, Artificial Sequence
  Description of Artificial Sequence: Synthetic oligonucleotide
aagaccccaaauaguacuu

SEQ ID NO: 6050 - RNA, 19 nt, Artificial Sequence
  Description of Artificial Sequence: Synthetic oligonucleotide
aaagaccccaaauaguacu

SEQ ID NO: 6051 - RNA, 19 nt, Artificial Sequence
  Description of Artificial Sequence: Synthetic oligonucleotide
caaagaccccaaauaguac

SEQ ID NO: 6052 - RNA, 19 nt, Artificial Sequence
  Description of Artificial Sequence: Synthetic oligonucleotide
acaaagaccccaaauagua

SEQ ID NO: 6053 - RNA, 19 nt, Artificial Sequence
  Description of Artificial Sequence: Synthetic oligonucleotide
cacaaagaccccaaauagu

SEQ ID NO: 6054 - RNA, 19 nt, Artificial Sequence
  Description of Artificial Sequence: Synthetic oligonucleotide
ucacaaagaccccaaauag

SEQ ID NO: 6055 - RNA, 19 nt, Artificial Sequence
  Description of Artificial Sequence: Synthetic oligonucleotide
gucacaaagaccccaaaua

SEQ ID NO: 6056 - RNA, 19 nt, Artificial Sequence
  Description of Artificial Sequence: Synthetic oligonucleotide
agucacaaagaccccaaau

SEQ ID NO: 6057 - RNA, 19 nt, Artificial Sequence
  Description of Artificial Sequence: Synthetic oligonucleotide
cagucacaaagaccccaaa

SEQ ID NO: 6058 - RNA, 19 nt, Artificial Sequence
  Description of Artificial Sequence: Synthetic oligonucleotide
ccagucacaaagaccccaa

SEQ ID NO: 6059 - RNA, 19 nt, Artificial Sequence
  Description of Artificial Sequence: Synthetic oligonucleotide
gccagucacaaagacccca

SEQ ID NO: 6060 - RNA, 19 nt, Artificial Sequence
  Description of Artificial Sequence: Synthetic oligonucleotide
ugccagucacaaagacccc

SEQ ID NO: 6061 - RNA, 19 nt, Artificial Sequence
  Description of Artificial Sequence: Synthetic oligonucleotide
uugccagucacaaagaccc

SEQ ID NO: 6062 - RNA, 19 nt, Artificial Sequence
  Description of Artificial Sequence: Synthetic oligonucleotide
cuugccagucacaaagacc

SEQ ID NO: 6063 - RNA, 19 nt, Artificial Sequence
  Description of Artificial Sequence: Synthetic oligonucleotide
ccuugccagucacaaagac

SEQ ID NO: 6064 - RNA, 19 nt, Artificial Sequence
  Description of Artificial Sequence: Synthetic oligonucleotide
uccuugccagucacaaaga

SEQ ID NO: 6065 - RNA, 19 nt, Artificial Sequence
  Description of Artificial Sequence: Synthetic oligonucleotide
auccuugccagucacaaag

SEQ ID NO: 6066 - RNA, 19 nt, Artificial Sequence
  Description of Artificial Sequence: Synthetic oligonucleotide
cauccuugccagucacaaa

SEQ ID NO: 6067 - RNA, 19 nt, Artificial Sequence
  Description of Artificial Sequence: Synthetic oligonucleotide
ccauccuugccagucacaa

SEQ ID NO: 6068 - RNA, 19 nt, Artificial Sequence
  Description of Artificial Sequence: Synthetic oligonucleotide
accauccuugccagucaca

SEQ ID NO: 6069 - RNA, 19 nt, Artificial Sequence
  Description of Artificial Sequence: Synthetic oligonucleotide
caccauccuugccagucac

SEQ ID NO: 6070 - RNA, 19 nt, Artificial Sequence
  Description of Artificial Sequence: Synthetic oligonucleotide
ccaccauccuugccaguca

SEQ ID NO: 6071 - RNA, 19 nt, Artificial Sequence
  Description of Artificial Sequence: Synthetic oligonucleotide
accaccauccuugccaguc

SEQ ID NO: 6072 - RNA, 19 nt, Artificial Sequence
  Description of Artificial Sequence: Synthetic oligonucleotide
gaccaccauccuugccagu

SEQ ID NO: 6073 - RNA, 19 nt, Artificial Sequence
  Description of Artificial Sequence: Synthetic oligonucleotide
ggaccaccauccuugccag

SEQ ID NO: 6074 - RNA, 19 nt, Artificial Sequence
  Description of Artificial Sequence: Synthetic oligonucleotide
aggaccaccauccuugcca

SEQ ID NO: 6075 - RNA, 19 nt, Artificial Sequence
  Description of Artificial Sequence: Synthetic oligonucleotide
caggaccaccauccuugcc

SEQ ID NO: 6076 - RNA, 19 nt, Artificial Sequence
  Description of Artificial Sequence: Synthetic oligonucleotide
ccaggaccaccauccuugc

SEQ ID NO: 6077 - RNA, 19 nt, Artificial Sequence
  Description of Artificial Sequence: Synthetic oligonucleotide
gccaggaccaccauccuug

SEQ ID NO: 6078 - RNA, 19 nt, Artificial Sequence
  Description of Artificial Sequence: Synthetic oligonucleotide
cgccaggaccaccauccuu

SEQ ID NO: 6079 - RNA, 19 nt, Artificial Sequence
  Description of Artificial Sequence: Synthetic oligonucleotide
acgccaggaccaccauccu

SEQ ID NO: 6080 - RNA, 19 nt, Artificial Sequence
  Description of Artificial Sequence: Synthetic oligonucleotide
cacgccaggaccaccaucc

SEQ ID NO: 6081 - RNA, 19 nt, Artificial Sequence
  Description of Artificial Sequence: Synthetic oligonucleotide
ccacgccaggaccaccauc

SEQ ID NO: 6082 - RNA, 19 nt, Artificial Sequence
  Description of Artificial Sequence: Synthetic oligonucleotide
cccacgccaggaccaccau

SEQ ID NO: 6083 - RNA, 19 nt, Artificial Sequence
  Description of Artificial Sequence: Synthetic oligonucleotide
gcccacgccaggaccacca

SEQ ID NO: 6084 - RNA, 19 nt, Artificial Sequence
  Description of Artificial Sequence: Synthetic oligonucleotide
ggcccacgccaggaccacc

SEQ ID NO: 6085 - RNA, 19 nt, Artificial Sequence
  Description of Artificial Sequence: Synthetic oligonucleotide
gggcccacgccaggaccac

SEQ ID NO: 6086 - RNA, 19 nt, Artificial Sequence
  Description of Artificial Sequence: Synthetic oligonucleotide
ggggcccacgccaggacca

SEQ ID NO: 6087 - RNA, 19 nt, Artificial Sequence
  Description of Artificial Sequence: Synthetic oligonucleotide
uggggcccacgccaggacc

SEQ ID NO: 6088 - RNA, 19 nt, Artificial Sequence
  Description of Artificial Sequence: Synthetic oligonucleotide
uuggggcccacgccaggac

SEQ ID NO: 6089 - RNA, 19 nt, Artificial Sequence
  Description of Artificial Sequence: Synthetic oligonucleotide
guuggggcccacgccagga

SEQ ID NO: 6090 - RNA, 19 nt, Artificial Sequence
  Description of Artificial Sequence: Synthetic oligonucleotide
aguuggggcccacgccagg

SEQ ID NO: 6091 - RNA, 19 nt, Artificial Sequence
  Description of Artificial Sequence: Synthetic oligonucleotide
gaguuggggcccacgccag

SEQ ID NO: 6092 - RNA, 19 nt, Artificial Sequence
  Description of Artificial Sequence: Synthetic oligonucleotide
agaguuggggcccacgcca

SEQ ID NO: 6093 - RNA, 19 nt, Artificial Sequence
  Description of Artificial Sequence: Synthetic oligonucleotide
cagaguuggggcccacgcc

SEQ ID NO: 6094 - RNA, 19 nt, Artificial Sequence
  Description of Artificial Sequence: Synthetic oligonucleotide
acagaguuggggcccacgc

SEQ ID NO: 6095 - RNA, 19 nt, Artificial Sequence
  Description of Artificial Sequence: Synthetic oligonucleotide
gacagaguuggggcccacg

SEQ ID NO: 6096 - RNA, 19 nt, Artificial Sequence
  Description of Artificial Sequence: Synthetic oligonucleotide
cgacagaguuggggcccac

SEQ ID NO: 6097 - RNA, 19 nt, Artificial Sequence
  Description of Artificial Sequence: Synthetic oligonucleotide
acgacagaguuggggccca

SEQ ID NO: 6098 - RNA, 19 nt, Artificial Sequence
  Description of Artificial Sequence: Synthetic oligonucleotide
gacgacagaguuggggccc

SEQ ID NO: 6099 - RNA, 19 nt, Artificial Sequence
  Description of Artificial Sequence: Synthetic oligonucleotide
agacgacagaguuggggcc

SEQ ID NO: 6100 - RNA, 19 nt, Artificial Sequence
  Description of Artificial Sequence: Synthetic oligonucleotide
cagacgacagaguuggggc

SEQ ID NO: 6101 - RNA, 19 nt, Artificial Sequence
  Description of Artificial Sequence: Synthetic oligonucleotide
acagacgacagaguugggg

SEQ ID NO: 6102 - RNA, 19 nt, Artificial Sequence
  Description of Artificial Sequence: Synthetic oligonucleotide
cacagacgacagaguuggg

SEQ ID NO: 6103 - RNA, 19 nt, Artificial Sequence
  Description of Artificial Sequence: Synthetic oligonucleotide
gcacagacgacagaguugg

SEQ ID NO: 6104 - RNA, 19 nt, Artificial Sequence
  Description of Artificial Sequence: Synthetic oligonucleotide
ggcacagacgacagaguug

SEQ ID NO: 6105 - RNA, 19 nt, Artificial Sequence
  Description of Artificial Sequence: Synthetic oligonucleotide
aggcacagacgacagaguu

SEQ ID NO: 6106 - RNA, 19 nt, Artificial Sequence
  Description of Artificial Sequence: Synthetic oligonucleotide
aaggcacagacgacagagu

SEQ ID NO: 6107 - RNA, 19 nt, Artificial Sequence
  Description of Artificial Sequence: Synthetic oligonucleotide
gaaggcacagacgacagag

SEQ ID NO: 6108 - RNA, 19 nt, Artificial Sequence
  Description of Artificial Sequence: Synthetic oligonucleotide
ggaaggcacagacgacaga

SEQ ID NO: 6109 - RNA, 19 nt, Artificial Sequence
  Description of Artificial Sequence: Synthetic oligonucleotide
gggaaggcacagacgacag

SEQ ID NO: 6110 - RNA, 19 nt, Artificial Sequence
  Description of Artificial Sequence: Synthetic oligonucleotide
ggggaaggcacagacgaca

SEQ ID NO: 6111 - RNA, 19 nt, Artificial Sequence
  Description of Artificial Sequence: Synthetic oligonucleotide
uggggaaggcacagacgac

SEQ ID NO: 6112 - RNA, 19 nt, Artificial Sequence
  Description of Artificial Sequence: Synthetic oligonucleotide
auggggaaggcacagacga

SEQ ID NO: 6113 - RNA, 19 nt, Artificial Sequence
  Description of Artificial Sequence: Synthetic oligonucleotide
aauggggaaggcacagacg

SEQ ID NO: 6114 - RNA, 19 nt, Artificial Sequence
  Description of Artificial Sequence: Synthetic oligonucleotide
caauggggaaggcacagac

SEQ ID NO: 6115 - RNA, 19 nt, Artificial Sequence
  Description of Artificial Sequence: Synthetic oligonucleotide
ucaauggggaaggcacaga

SEQ ID NO: 6116 - RNA, 19 nt, Artificial Sequence
  Description of Artificial Sequence: Synthetic oligonucleotide
gucaauggggaaggcacag

SEQ ID NO: 6117 - RNA, 19 nt, Artificial Sequence
  Description of Artificial Sequence: Synthetic oligonucleotide
ggucaauggggaaggcaca

SEQ ID NO: 6118 - RNA, 19 nt, Artificial Sequence
  Description of Artificial Sequence: Synthetic oligonucleotide
aggucaauggggaaggcac

SEQ ID NO: 6119 - RNA, 19 nt, Artificial Sequence
  Description of Artificial Sequence: Synthetic oligonucleotide
caggucaauggggaaggca

SEQ ID NO: 6120 - RNA, 19 nt, Artificial Sequence
  Description of Artificial Sequence: Synthetic oligonucleotide
gcaggucaauggggaaggc

SEQ ID NO: 6121 - RNA, 19 nt, Artificial Sequence
  Description of Artificial Sequence: Synthetic oligonucleotide
agcaggucaauggggaagg

SEQ ID NO: 6122 - RNA, 19 nt, Artificial Sequence
  Description of Artificial Sequence: Synthetic oligonucleotide
cagcaggucaauggggaag

SEQ ID NO: 6123 - RNA, 19 nt, Artificial Sequence
  Description of Artificial Sequence: Synthetic oligonucleotide
ccagcaggucaauggggaa

SEQ ID NO: 6124 - RNA, 19 nt, Artificial Sequence
  Description of Artificial Sequence: Synthetic oligonucleotide
uccagcaggucaaugggga

SEQ ID NO: 6125 - RNA, 19 nt, Artificial Sequence
  Description of Artificial Sequence: Synthetic oligonucleotide
guccagcaggucaaugggg

SEQ ID NO: 6126 - RNA, 19 nt, Artificial Sequence
  Description of Artificial Sequence: Synthetic oligonucleotide
uguccagcaggucaauggg

SEQ ID NO: 6127 - RNA, 19 nt, Artificial Sequence
  Description of Artificial Sequence: Synthetic oligonucleotide
guguccagcaggucaaugg

SEQ ID NO: 6128 - RNA, 19 nt, Artificial Sequence
  Description of Artificial Sequence: Synthetic oligonucleotide
uguguccagcaggucaaug

SEQ ID NO: 6129 - RNA, 19 nt, Artificial Sequence
  Description of Artificial Sequence: Synthetic oligonucleotide
guguguccagcaggucaau

SEQ ID NO: 6130 - RNA, 19 nt, Artificial Sequence
  Description of Artificial Sequence: Synthetic oligonucleotide
aguguguccagcaggucaa

SEQ ID NO: 6131 - RNA, 19 nt, Artificial Sequence
  Description of Artificial Sequence: Synthetic oligonucleotide
uaguguguccagcagguca

SEQ ID NO: 6132 - RNA, 19 nt, Artificial Sequence
  Description of Artificial Sequence: Synthetic oligonucleotide
uuaguguguccagcagguc

SEQ ID NO: 6133 - RNA, 19 nt, Artificial Sequence
  Description of Artificial Sequence: Synthetic oligonucleotide
auuaguguguccagcaggu

SEQ ID NO: 6134 - RNA, 19 nt, Artificial Sequence
  Description of Artificial Sequence: Synthetic oligonucleotide
aauuaguguguccagcagg

SEQ ID NO: 6135 - RNA, 19 nt, Artificial Sequence
  Description of Artificial Sequence: Synthetic oligonucleotide
caauuaguguguccagcag

SEQ ID NO: 6136 - RNA, 19 nt, Artificial Sequence
  Description of Artificial Sequence: Synthetic oligonucleotide
ucaauuaguguguccagca

SEQ ID NO: 6137 - RNA, 19 nt, Artificial Sequence
  Description of Artificial Sequence: Synthetic oligonucleotide
aucaauuaguguguccagc

SEQ ID NO: 6138 - RNA, 19 nt, Artificial Sequence
  Description of Artificial Sequence: Synthetic oligonucleotide
caucaauuaguguguccag

SEQ ID NO: 6139 - RNA, 19 nt, Artificial Sequence
  Description of Artificial Sequence: Synthetic oligonucleotide
ucaucaauuagugugucca

SEQ ID NO: 6140 - RNA, 19 nt, Artificial Sequence
  Description of Artificial Sequence: Synthetic oligonucleotide
cucaucaauuagugugucc

SEQ ID NO: 6141 - RNA, 19 nt, Artificial Sequence
  Description of Artificial Sequence: Synthetic oligonucleotide
ccucaucaauuaguguguc

SEQ ID NO: 6142 - RNA, 19 nt, Artificial Sequence
  Description of Artificial Sequence: Synthetic oligonucleotide
cccucaucaauuagugugu

SEQ ID NO: 6143 - RNA, 19 nt, Artificial Sequence
  Description of Artificial Sequence: Synthetic oligonucleotide
acccucaucaauuagugug

SEQ ID NO: 6144 - RNA, 19 nt, Artificial Sequence
  Description of Artificial Sequence: Synthetic oligonucleotide
cacccucaucaauuagugu

SEQ ID NO: 6145 - RNA, 19 nt, Artificial Sequence
  Description of Artificial Sequence: Synthetic oligonucleotide
acacccucaucaauuagug

SEQ ID NO: 6146 - RNA, 19 nt, Artificial Sequence
  Description of Artificial Sequence: Synthetic oligonucleotide
cacacccucaucaauuagu

SEQ ID NO: 6147 - RNA, 19 nt, Artificial Sequence
  Description of Artificial Sequence: Synthetic oligonucleotide
ccacacccucaucaauuag

SEQ ID NO: 6148 - RNA, 19 nt, Artificial Sequence
  Description of Artificial Sequence: Synthetic oligonucleotide
uccacacccucaucaauua

SEQ ID NO: 6149 - RNA, 19 nt, Artificial Sequence
  Description of Artificial Sequence: Synthetic oligonucleotide
cuccacacccucaucaauu

SEQ ID NO: 6150 - RNA, 19 nt, Artificial Sequence
  Description of Artificial Sequence: Synthetic oligonucleotide
gcuccacacccucaucaau

SEQ ID NO: 6151 - RNA, 19 nt, Artificial Sequence
  Description of Artificial Sequence: Synthetic oligonucleotide
cgcuccacacccucaucaa

SEQ ID NO: 6152 - RNA, 19 nt, Artificial Sequence
  Description of Artificial Sequence: Synthetic oligonucleotide
gcgcuccacacccucauca

SEQ ID NO: 6153 - RNA, 19 nt, Artificial Sequence
  Description of Artificial Sequence: Synthetic oligonucleotide
agcgcuccacacccucauc

SEQ ID NO: 6154 - RNA, 19 nt, Artificial Sequence
  Description of Artificial Sequence: Synthetic oligonucleotide
cagcgcuccacacccucau

SEQ ID NO: 6155 - RNA, 19 nt, Artificial Sequence
  Description of Artificial Sequence: Synthetic oligonucleotide
acagcgcuccacacccuca

SEQ ID NO: 6156 - RNA, 19 nt, Artificial Sequence
  Description of Artificial Sequence: Synthetic oligonucleotide
aacagcgcuccacacccuc

SEQ ID NO: 6157 - RNA, 19 nt, Artificial Sequence
  Description of Artificial Sequence: Synthetic oligonucleotide
caacagcgcuccacacccu

SEQ ID NO: 6158 - RNA, 19 nt, Artificial Sequence
  Description of Artificial Sequence: Synthetic oligonucleotide
acaacagcgcuccacaccc

SEQ ID NO: 6159 - RNA, 19 nt, Artificial Sequence
  Description of Artificial Sequence: Synthetic oligonucleotide
cacaacagcgcuccacacc

SEQ ID NO: 6160 - RNA, 19 nt, Artificial Sequence
  Description of Artificial Sequence: Synthetic oligonucleotide
ucacaacagcgcuccacac

SEQ ID NO: 6161 - RNA, 19 nt, Artificial Sequence
  Description of Artificial Sequence: Synthetic oligonucleotide
uucacaacagcgcuccaca

SEQ ID NO: 6162 - RNA, 19 nt, Artificial Sequence
  Description of Artificial Sequence: Synthetic oligonucleotide
auucacaacagcgcuccac

SEQ ID NO: 6163 - RNA, 19 nt, Artificial Sequence
  Description of Artificial Sequence: Synthetic oligonucleotide
gauucacaacagcgcucca

SEQ ID NO: 6164 - RNA, 19 nt, Artificial Sequence
  Description of Artificial Sequence: Synthetic oligonucleotide
ggauucacaacagcgcucc

SEQ ID NO: 6165 - RNA, 19 nt, Artificial Sequence
  Description of Artificial Sequence: Synthetic oligonucleotide
gggauucacaacagcgcuc

SEQ ID NO: 6166 - RNA, 19 nt, Artificial Sequence
  Description of Artificial Sequence: Synthetic oligonucleotide
ggggauucacaacagcgcu

SEQ ID NO: 6167 - RNA, 19 nt, Artificial Sequence
  Description of Artificial Sequence: Synthetic oligonucleotide
uggggauucacaacagcgc

SEQ ID NO: 6168 - RNA, 19 nt, Artificial Sequence
  Description of Artificial Sequence: Synthetic oligonucleotide
cuggggauucacaacagcg

SEQ ID NO: 6169 - RNA, 19 nt, Artificial Sequence
  Description of Artificial Sequence: Synthetic oligonucleotide
acuggggauucacaacagc

SEQ ID NO: 6170 - RNA, 19 nt, Artificial Sequence
  Description of Artificial Sequence: Synthetic oligonucleotide
gacuggggauucacaacag

SEQ ID NO: 6171 - RNA, 19 nt, Artificial Sequence
  Description of Artificial Sequence: Synthetic oligonucleotide
ggacuggggauucacaaca

SEQ ID NO: 6172 - RNA, 19 nt, Artificial Sequence
  Description of Artificial Sequence: Synthetic oligonucleotide
uggacuggggauucacaac

SEQ ID NO: 6173 - RNA, 19 nt, Artificial Sequence
  Description of Artificial Sequence: Synthetic oligonucleotide
auggacuggggauucacaa

SEQ ID NO: 6174 - RNA, 19 nt, Artificial Sequence
  Description of Artificial Sequence: Synthetic oligonucleotide
gauggacuggggauucaca

SEQ ID NO: 6175 - RNA, 19 nt, Artificial Sequence
  Description of Artificial Sequence: Synthetic oligonucleotide
ggauggacuggggauucac

SEQ ID NO: 6176 - RNA, 19 nt, Artificial Sequence
  Description of Artificial Sequence: Synthetic oligonucleotide
uggauggacuggggauuca

SEQ ID NO: 6177 - RNA, 19 nt, Artificial Sequence
  Description of Artificial Sequence: Synthetic oligonucleotide
cuggauggacuggggauuc

SEQ ID NO: 6178 - RNA, 19 nt, Artificial Sequence
  Description of Artificial Sequence: Synthetic oligonucleotide
ccuggauggacuggggauu

SEQ ID NO: 6179 - RNA, 19 nt, Artificial Sequence
  Description of Artificial Sequence: Synthetic oligonucleotide
gccuggauggacuggggau

SEQ ID NO: 6180 - RNA, 19 nt, Artificial Sequence
  Description of Artificial Sequence: Synthetic oligonucleotide
ggccuggauggacugggga

SEQ ID NO: 6181 - RNA, 19 nt, Artificial Sequence
  Description of Artificial Sequence: Synthetic oligonucleotide
aggccuggauggacugggg

SEQ ID NO: 6182 - RNA, 19 nt, Artificial Sequence
  Description of Artificial Sequence: Synthetic oligonucleotide
gaggccuggauggacuggg

SEQ ID NO: 6183 - RNA, 19 nt, Artificial Sequence
  Description of Artificial Sequence: Synthetic oligonucleotide
ggaggccuggauggacugg

SEQ ID NO: 6184 - RNA, 19 nt, Artificial Sequence
  Description of Artificial Sequence: Synthetic oligonucleotide
cggaggccuggauggacug

SEQ ID NO: 6185 - RNA, 19 nt, Artificial Sequence
  Description of Artificial Sequence: Synthetic oligonucleotide
ccggaggccuggauggacu

SEQ ID NO: 6186 - RNA, 19 nt, Artificial Sequence
  Description of Artificial Sequence: Synthetic oligonucleotide
gccggaggccuggauggac

SEQ ID NO: 6187 - RNA, 19 nt, Artificial Sequence
  Description of Artificial Sequence: Synthetic oligonucleotide
cgccggaggccuggaugga

SEQ ID NO: 6188 - RNA, 19 nt, Artificial Sequence
  Description of Artificial Sequence: Synthetic oligonucleotide
ucgccggaggccuggaugg

SEQ ID NO: 6189 - RNA, 19 nt, Artificial Sequence
  Description of Artificial Sequence: Synthetic oligonucleotide
cucgccggaggccuggaug

SEQ ID NO: 6190 - RNA, 19 nt, Artificial Sequence
  Description of Artificial Sequence: Synthetic oligonucleotide
ccucgccggaggccuggau

SEQ ID NO: 6191 - RNA, 19 nt, Artificial Sequence
  Description of Artificial Sequence: Synthetic oligonucleotide
gccucgccggaggccugga

SEQ ID NO: 6192 - RNA, 19 nt, Artificial Sequence
  Description of Artificial Sequence: Synthetic oligonucleotide
ggccucgccggaggccugg

SEQ ID NO: 6193 - RNA, 19 nt, Artificial Sequence
  Description of Artificial Sequence: Synthetic oligonucleotide
aggccucgccggaggccug

SEQ ID NO: 6194 - RNA, 19 nt, Artificial Sequence
  Description of Artificial Sequence: Synthetic oligonucleotide
gaggccucgccggaggccu

SEQ ID NO: 6195 - RNA, 19 nt, Artificial Sequence
  Description of Artificial Sequence: Synthetic oligonucleotide
cgaggccucgccggaggcc

SEQ ID NO: 6196 - RNA, 19 nt, Artificial Sequence
  Description of Artificial Sequence: Synthetic oligonucleotide
ucgaggccucgccggaggc

SEQ ID NO: 6197 - RNA, 19 nt, Artificial Sequence
  Description of Artificial Sequence: Synthetic oligonucleotide
gucgaggccucgccggagg

SEQ ID NO: 6198 - RNA, 19 nt, Artificial Sequence
  Description of Artificial Sequence: Synthetic oligonucleotide
agucgaggccucgccggag

SEQ ID NO: 6199 - RNA, 19 nt, Artificial Sequence
  Description of Artificial Sequence: Synthetic oligonucleotide
aagucgaggccucgccgga

SEQ ID NO: 6200 - RNA, 19 nt, Artificial Sequence
  Description of Artificial Sequence: Synthetic oligonucleotide
gaagucgaggccucgccgg

SEQ ID NO: 6201 - RNA, 19 nt, Artificial Sequence
  Description of Artificial Sequence: Synthetic oligonucleotide
agaagucgaggccucgccg

SEQ ID NO: 6202 - RNA, 19 nt, Artificial Sequence
  Description of Artificial Sequence: Synthetic oligonucleotide
aagaagucgaggccucgcc

SEQ ID NO: 6203 - RNA, 19 nt, Artificial Sequence
  Description of Artificial Sequence: Synthetic oligonucleotide
gaagaagucgaggccucgc

SEQ ID NO: 6204 - RNA, 19 nt, Artificial Sequence
  Description of Artificial Sequence: Synthetic oligonucleotide
ggaagaagucgaggccucg

SEQ ID NO: 6205 - RNA, 19 nt, Artificial Sequence
  Description of Artificial Sequence: Synthetic oligonucleotide
uggaagaagucgaggccuc

SEQ ID NO: 6206 - RNA, 19 nt, Artificial Sequence
  Description of Artificial Sequence: Synthetic oligonucleotide
cuggaagaagucgaggccu

SEQ ID NO: 6207 - RNA, 19 nt, Artificial Sequence
  Description of Artificial Sequence: Synthetic oligonucleotide
acuggaagaagucgaggcc

SEQ ID NO: 6208 - RNA, 19 nt, Artificial Sequence
  Description of Artificial Sequence: Synthetic oligonucleotide
gacuggaagaagucgaggc

SEQ ID NO: 6209 - RNA, 19 nt, Artificial Sequence
  Description of Artificial Sequence: Synthetic oligonucleotide
cgacuggaagaagucgagg

SEQ ID NO: 6210 - RNA, 19 nt, Artificial Sequence
  Description of Artificial Sequence: Synthetic oligonucleotide
gcgacuggaagaagucgag

SEQ ID NO: 6211 - RNA, 19 nt, Artificial Sequence
  Description of Artificial Sequence: Synthetic oligonucleotide
ggcgacuggaagaagucga

SEQ ID NO: 6212 - RNA, 19 nt, Artificial Sequence
  Description of Artificial Sequence: Synthetic oligonucleotide
gggcgacuggaagaagucg

SEQ ID NO: 6213 - RNA, 19 nt, Artificial Sequence
  Description of Artificial Sequence: Synthetic oligonucleotide
ugggcgacuggaagaaguc

SEQ ID NO: 6214 - RNA, 19 nt, Artificial Sequence
  Description of Artificial Sequence: Synthetic oligonucleotide
cugggcgacuggaagaagu

SEQ ID NO: 6215 - RNA, 19 nt, Artificial Sequence
  Description of Artificial Sequence: Synthetic oligonucleotide
acugggcgacuggaagaag

SEQ ID NO: 6216 - RNA, 19 nt, Artificial Sequence
  Description of Artificial Sequence: Synthetic oligonucleotide
aacugggcgacuggaagaa

SEQ ID NO: 6217 - RNA, 19 nt, Artificial Sequence
  Description of Artificial Sequence: Synthetic oligonucleotide
aaacugggcgacuggaaga

SEQ ID NO: 6218 - RNA, 19 nt, Artificial Sequence
  Description of Artificial Sequence: Synthetic oligonucleotide
aaaacugggcgacuggaag

SEQ ID NO: 6219 - RNA, 19 nt, Artificial Sequence
  Description of Artificial Sequence: Synthetic oligonucleotide
aaaaacugggcgacuggaa

SEQ ID NO: 6220 - RNA, 19 nt, Artificial Sequence
  Description of Artificial Sequence: Synthetic oligonucleotide
caaaaacugggcgacugga

SEQ ID NO: 6221 - RNA, 19 nt, Artificial Sequence
  Description of Artificial Sequence: Synthetic oligonucleotide
gcaaaaacugggcgacugg

SEQ ID NO: 6222 - RNA, 19 nt, Artificial Sequence
  Description of Artificial Sequence: Synthetic oligonucleotide
ggcaaaaacugggcgacug

SEQ ID NO: 6223 - RNA, 19 nt, Artificial Sequence
  Description of Artificial Sequence: Synthetic oligonucleotide
gggcaaaaacugggcgacu

SEQ ID NO: 6224 - RNA, 19 nt, Artificial Sequence
  Description of Artificial Sequence: Synthetic oligonucleotide
ggggcaaaaacugggcgac

SEQ ID NO: 6225 - RNA, 19 nt, Artificial Sequence
  Description of Artificial Sequence: Synthetic oligonucleotide
uggggcaaaaacugggcga

SEQ ID NO: 6226 - RNA, 19 nt, Artificial Sequence
  Description of Artificial Sequence: Synthetic oligonucleotide
uuggggcaaaaacugggcg

SEQ ID NO: 6227 - RNA, 19 nt, Artificial Sequence
  Description of Artificial Sequence: Synthetic oligonucleotide
guuggggcaaaaacugggc

SEQ ID NO: 6228 - RNA, 19 nt, Artificial Sequence
  Description of Artificial Sequence: Synthetic oligonucleotide
gguuggggcaaaaacuggg

SEQ ID NO: 6229 - RNA, 19 nt, Artificial Sequence
  Description of Artificial Sequence: Synthetic oligonucleotide
ggguuggggcaaaaacugg

SEQ ID NO: 6230 - RNA, 19 nt, Artificial Sequence
  Description of Artificial Sequence: Synthetic oligonucleotide
cggguuggggcaaaaacug

SEQ ID NO: 6231 - RNA, 19 nt, Artificial Sequence
  Description of Artificial Sequence: Synthetic oligonucleotide
gcggguuggggcaaaaacu

SEQ ID NO: 6232 - RNA, 19 nt, Artificial Sequence
  Description of Artificial Sequence: Synthetic oligonucleotide
ggcggguuggggcaaaaac

SEQ ID NO: 6233 - RNA, 19 nt, Artificial Sequence
  Description of Artificial Sequence: Synthetic oligonucleotide
aggcggguuggggcaaaaa

SEQ ID NO: 6234 - RNA, 19 nt, Artificial Sequence
  Description of Artificial Sequence: Synthetic oligonucleotide
caggcggguuggggcaaaa

SEQ ID NO: 6235 - RNA, 19 nt, Artificial Sequence
  Description of Artificial Sequence: Synthetic oligonucleotide
ccaggcggguuggggcaaa

SEQ ID NO: 6236 - RNA, 19 nt, Artificial Sequence
  Description of Artificial Sequence: Synthetic oligonucleotide
gccaggcggguuggggcaa

SEQ ID NO: 6237 - RNA, 19 nt, Artificial Sequence
  Description of Artificial Sequence: Synthetic oligonucleotide
ggccaggcggguuggggca

SEQ ID NO: 6238 - RNA, 19 nt, Artificial Sequence
  Description of Artificial Sequence: Synthetic oligonucleotide
aggccaggcggguuggggc

SEQ ID NO: 6239 - RNA, 19 nt, Artificial Sequence
  Description of Artificial Sequence: Synthetic oligonucleotide
caggccaggcggguugggg

SEQ ID NO: 6240 - RNA, 19 nt, Artificial Sequence
  Description of Artificial Sequence: Synthetic oligonucleotide
ccaggccaggcggguuggg

SEQ ID NO: 6241 - RNA, 19 nt, Artificial Sequence
  Description of Artificial Sequence: Synthetic oligonucleotide
uccaggccaggcggguugg

SEQ ID NO: 6242 - RNA, 19 nt, Artificial Sequence
  Description of Artificial Sequence: Synthetic oligonucleotide
uuccaggccaggcggguug

SEQ ID NO: 6243 - RNA, 19 nt, Artificial Sequence
  Description of Artificial Sequence: Synthetic oligonucleotide
cuuccaggccaggcggguu

SEQ ID NO: 6244 - RNA, 19 nt, Artificial Sequence
  Description of Artificial Sequence: Synthetic oligonucleotide
gcuuccaggccaggcgggu

SEQ ID NO: 6245 - RNA, 19 nt, Artificial Sequence
  Description of Artificial Sequence: Synthetic oligonucleotide
ggcuuccaggccaggcggg

SEQ ID NO: 6246 - RNA, 19 nt, Artificial Sequence
  Description of Artificial Sequence: Synthetic oligonucleotide
gggcuuccaggccaggcgg

SEQ ID NO: 6247 - RNA, 19 nt, Artificial Sequence
  Description of Artificial Sequence: Synthetic oligonucleotide
agggcuuccaggccaggcg

SEQ ID NO: 6248 - RNA, 19 nt, Artificial Sequence
  Description of Artificial Sequence: Synthetic oligonucleotide
gagggcuuccaggccaggc

SEQ ID NO: 6249 - RNA, 19 nt, Artificial Sequence
  Description of Artificial Sequence: Synthetic oligonucleotide
ugagggcuuccaggccagg

SEQ ID NO: 6250 - RNA, 19 nt, Artificial Sequence
  Description of Artificial Sequence: Synthetic oligonucleotide
cugagggcuuccaggccag

SEQ ID NO: 6251 - RNA, 19 nt, Artificial Sequence
  Description of Artificial Sequence: Synthetic oligonucleotide
gcugagggcuuccaggcca

SEQ ID NO: 6252 - RNA, 19 nt, Artificial Sequence
  Description of Artificial Sequence: Synthetic oligonucleotide
ggcugagggcuuccaggcc

SEQ ID NO: 6253 - RNA, 19 nt, Artificial Sequence
  Description of Artificial Sequence: Synthetic oligonucleotide
gggcugagggcuuccaggc

SEQ ID NO: 6254 - RNA, 19 nt, Artificial Sequence
  Description of Artificial Sequence: Synthetic oligonucleotide
ggggcugagggcuuccagg

SEQ ID NO: 6255 - RNA, 19 nt, Artificial Sequence
  Description of Artificial Sequence: Synthetic oligonucleotide
uggggcugagggcuuccag

SEQ ID NO: 6256 - RNA, 19 nt, Artificial Sequence
  Description of Artificial Sequence: Synthetic oligonucleotide
uuggggcugagggcuucca

SEQ ID NO: 6257 - RNA, 19 nt, Artificial Sequence
  Description of Artificial Sequence: Synthetic oligonucleotide
guuggggcugagggcuucc

SEQ ID NO: 6258 - RNA, 19 nt, Artificial Sequence
  Description of Artificial Sequence: Synthetic oligonucleotide
uguuggggcugagggcuuc

SEQ ID NO: 6259 - RNA, 19 nt, Artificial Sequence
  Description of Artificial Sequence: Synthetic oligonucleotide
guguuggggcugagggcuu

SEQ ID NO: 6260 - RNA, 19 nt, Artificial Sequence
  Description of Artificial Sequence: Synthetic oligonucleotide
gguguuggggcugagggcu

SEQ ID NO: 6261 - RNA, 19 nt, Artificial Sequence
  Description of Artificial Sequence: Synthetic oligonucleotide
ugguguuggggcugagggc

SEQ ID NO: 6262 - RNA, 19 nt, Artificial Sequence
  Description of Artificial Sequence: Synthetic oligonucleotide
cugguguuggggcugaggg

SEQ ID NO: 6263 - RNA, 19 nt, Artificial Sequence
  Description of Artificial Sequence: Synthetic oligonucleotide
gcugguguuggggcugagg

SEQ ID NO: 6264 - RNA, 19 nt, Artificial Sequence
  Description of Artificial Sequence: Synthetic oligonucleotide
agcugguguuggggcugag

SEQ ID NO: 6265 - RNA, 19 nt, Artificial Sequence
  Description of Artificial Sequence: Synthetic oligonucleotide
cagcugguguuggggcuga

SEQ ID NO: 6266 - RNA, 19 nt, Artificial Sequence
  Description of Artificial Sequence: Synthetic oligonucleotide
gcagcugguguuggggcug

SEQ ID NO: 6267 - RNA, 19 nt, Artificial Sequence
  Description of Artificial Sequence: Synthetic oligonucleotide
ggcagcugguguuggggcu

SEQ ID NO: 6268 - RNA, 19 nt, Artificial Sequence
  Description of Artificial Sequence: Synthetic oligonucleotide
cggcagcugguguuggggc

SEQ ID NO: 6269 - RNA, 19 nt, Artificial Sequence
  Description of Artificial Sequence: Synthetic oligonucleotide
gcggcagcugguguugggg

SEQ ID NO: 6270 - RNA, 19 nt, Artificial Sequence
  Description of Artificial Sequence: Synthetic oligonucleotide
ggcggcagcugguguuggg

SEQ ID NO: 6271 - RNA, 19 nt, Artificial Sequence
  Description of Artificial Sequence: Synthetic oligonucleotide
uggcggcagcugguguugg

SEQ ID NO: 6272 - RNA, 19 nt, Artificial Sequence
  Description of Artificial Sequence: Synthetic oligonucleotide
guggcggcagcugguguug

SEQ ID NO: 6273 - RNA, 19 nt, Artificial Sequence
  Description of Artificial Sequence: Synthetic oligonucleotide
aguggcggcagcugguguu

SEQ ID NO: 6274 - RNA, 19 nt, Artificial Sequence
  Description of Artificial Sequence: Synthetic oligonucleotide
aaguggcggcagcuggugu

SEQ ID NO: 6275 - RNA, 19 nt, Artificial Sequence
  Description of Artificial Sequence: Synthetic oligonucleotide
gaaguggcggcagcuggug

SEQ ID NO: 6276 - RNA, 19 nt, Artificial Sequence
  Description of Artificial Sequence: Synthetic oligonucleotide
ggaaguggcggcagcuggu

SEQ ID NO: 6277 - RNA, 19 nt, Artificial Sequence
  Description of Artificial Sequence: Synthetic oligonucleotide
gggaaguggcggcagcugg

SEQ ID NO: 6278 - RNA, 19 nt, Artificial Sequence
  Description of Artificial Sequence: Synthetic oligonucleotide
agggaaguggcggcagcug

SEQ ID NO: 6279 - RNA, 19 nt, Artificial Sequence
  Description of Artificial Sequence: Synthetic oligonucleotide
gagggaaguggcggcagcu

SEQ ID NO: 6280 - RNA, 19 nt, Artificial Sequence
  Description of Artificial Sequence: Synthetic oligonucleotide
agagggaaguggcggcagc

SEQ ID NO: 6281 - RNA, 19 nt, Artificial Sequence
  Description of Artificial Sequence: Synthetic oligonucleotide
cagagggaaguggcggcag

SEQ ID NO: 6282 - RNA, 19 nt, Artificial Sequence
  Description of Artificial Sequence: Synthetic oligonucleotide
gcagagggaaguggcggca

SEQ ID NO: 6283 - RNA, 19 nt, Artificial Sequence
  Description of Artificial Sequence: Synthetic oligonucleotide
agcagagggaaguggcggc

SEQ ID NO: 6284 - RNA, 19 nt, Artificial Sequence
  Description of Artificial Sequence: Synthetic oligonucleotide
cagcagagggaaguggcgg

SEQ ID NO: 6285 - RNA, 19 nt, Artificial Sequence
  Description of Artificial Sequence: Synthetic oligonucleotide
ccagcagagggaaguggcg

SEQ ID NO: 6286 - RNA, 19 nt, Artificial Sequence
  Description of Artificial Sequence: Synthetic oligonucleotide
accagcagagggaaguggc

SEQ ID NO: 6287 - RNA, 19 nt, Artificial Sequence
  Description of Artificial Sequence: Synthetic oligonucleotide
gaccagcagagggaagugg

SEQ ID NO: 6288 - RNA, 19 nt, Artificial Sequence
  Description of Artificial Sequence: Synthetic oligonucleotide
ugaccagcagagggaagug

SEQ ID NO: 6289 - RNA, 19 nt, Artificial Sequence
  Description of Artificial Sequence: Synthetic oligonucleotide
cugaccagcagagggaagu

SEQ ID NO: 6290 - RNA, 19 nt, Artificial Sequence
  Description of Artificial Sequence: Synthetic oligonucleotide
acugaccagcagagggaag

SEQ ID NO: 6291 - RNA, 19 nt, Artificial Sequence
  Description of Artificial Sequence: Synthetic oligonucleotide
uacugaccagcagagggaa

SEQ ID NO: 6292 - RNA, 19 nt, Artificial Sequence
  Description of Artificial Sequence: Synthetic oligonucleotide
cuacugaccagcagaggga

SEQ ID NO: 6293 - RNA, 19 nt, Artificial Sequence
  Description of Artificial Sequence: Synthetic oligonucleotide
gcuacugaccagcagaggg

SEQ ID NO: 6294 - RNA, 19 nt, Artificial Sequence
  Description of Artificial Sequence: Synthetic oligonucleotide
ugcuacugaccagcagagg

SEQ ID NO: 6295 - RNA, 19 nt, Artificial Sequence
  Description of Artificial Sequence: Synthetic oligonucleotide
cugcuacugaccagcagag

SEQ ID NO: 6296 - RNA, 19 nt, Artificial Sequence
  Description of Artificial Sequence: Synthetic oligonucleotide
gcugcuacugaccagcaga

SEQ ID NO: 6297 - RNA, 19 nt, Artificial Sequence
  Description of Artificial Sequence: Synthetic oligonucleotide
agcugcuacugaccagcag

SEQ ID NO: 6298 - RNA, 19 nt, Artificial Sequence
  Description of Artificial Sequence: Synthetic oligonucleotide
aagcugcuacugaccagca

SEQ ID NO: 6299 - RNA, 19 nt, Artificial Sequence
  Description of Artificial Sequence: Synthetic oligonucleotide
gaagcugcuacugaccagc

SEQ ID NO: 6300 - RNA, 19 nt, Artificial Sequence
  Description of Artificial Sequence: Synthetic oligonucleotide
agaagcugcuacugaccag

SEQ ID NO: 6301 - RNA, 19 nt, Artificial Sequence
  Description of Artificial Sequence: Synthetic oligonucleotide
gagaagcugcuacugacca

SEQ ID NO: 6302 - RNA, 19 nt, Artificial Sequence
  Description of Artificial Sequence: Synthetic oligonucleotide
ugagaagcugcuacugacc

SEQ ID NO: 6303 - RNA, 19 nt, Artificial Sequence
  Description of Artificial Sequence: Synthetic oligonucleotide
gugagaagcugcuacugac

SEQ ID NO: 6304 - RNA, 19 nt, Artificial Sequence
  Description of Artificial Sequence: Synthetic oligonucleotide
cgugagaagcugcuacuga

SEQ ID NO: 6305 - RNA, 19 nt, Artificial Sequence
  Description of Artificial Sequence: Synthetic oligonucleotide
acgugagaagcugcuacug

SEQ ID NO: 6306 - RNA, 19 nt, Artificial Sequence
  Description of Artificial Sequence: Synthetic oligonucleotide
cacgugagaagcugcuacu

SEQ ID NO: 6307 - RNA, 19 nt, Artificial Sequence
  Description of Artificial Sequence: Synthetic oligonucleotide
acacgugagaagcugcuac

SEQ ID NO: 6308 - RNA, 19 nt, Artificial Sequence
  Description of Artificial Sequence: Synthetic oligonucleotide
cacacgugagaagcugcua

SEQ ID NO: 6309 - RNA, 19 nt, Artificial Sequence
  Description of Artificial Sequence: Synthetic oligonucleotide
ccacacgugagaagcugcu

SEQ ID NO: 6310 - RNA, 19 nt, Artificial Sequence
  Description of Artificial Sequence: Synthetic oligonucleotide
uccacacgugagaagcugc

SEQ ID NO: 6311 - RNA, 19 nt, Artificial Sequence
  Description of Artificial Sequence: Synthetic oligonucleotide
guccacacgugagaagcug

SEQ ID NO: 6312 - RNA, 19 nt, Artificial Sequence
  Description of Artificial Sequence: Synthetic oligonucleotide
gguccacacgugagaagcu

SEQ ID NO: 6313 - RNA, 19 nt, Artificial Sequence
  Description of Artificial Sequence: Synthetic oligonucleotide
agguccacacgugagaagc

SEQ ID NO: 6314 - RNA, 19 nt, Artificial Sequence
  Description of Artificial Sequence: Synthetic oligonucleotide
uagguccacacgugagaag

SEQ ID NO: 6315 - RNA, 19 nt, Artificial Sequence
  Description of Artificial Sequence: Synthetic oligonucleotide
auagguccacacgugagaa

SEQ ID NO: 6316 - RNA, 19 nt, Artificial Sequence
  Description of Artificial Sequence: Synthetic oligonucleotide
aauagguccacacgugaga

SEQ ID NO: 6317 - RNA, 19 nt, Artificial Sequence
  Description of Artificial Sequence: Synthetic oligonucleotide
gaauagguccacacgugag

SEQ ID NO: 6318 - RNA, 19 nt, Artificial Sequence
  Description of Artificial Sequence: Synthetic oligonucleotide
ugaauagguccacacguga

SEQ ID NO: 6319 - RNA, 19 nt, Artificial Sequence
  Description of Artificial Sequence: Synthetic oligonucleotide
uugaauagguccacacgug

SEQ ID NO: 6320 - RNA, 19 nt, Artificial Sequence
  Description of Artificial Sequence: Synthetic oligonucleotide
auugaauagguccacacgu

SEQ ID NO: 6321 - RNA, 19 nt, Artificial Sequence
  Description of Artificial Sequence: Synthetic oligonucleotide
cauugaauagguccacacg

SEQ ID NO: 6322 - RNA, 19 nt, Artificial Sequence
  Description of Artificial Sequence: Synthetic oligonucleotide
ccauugaauagguccacac

SEQ ID NO: 6323 - RNA, 19 nt, Artificial Sequence
  Description of Artificial Sequence: Synthetic oligonucleotide
cccauugaauagguccaca

SEQ ID NO: 6324 - RNA, 19 nt, Artificial Sequence
  Description of Artificial Sequence: Synthetic oligonucleotide
gcccauugaauagguccac

SEQ ID NO: 6325 - RNA, 19 nt, Artificial Sequence
  Description of Artificial Sequence: Synthetic oligonucleotide
agcccauugaauaggucca

SEQ ID NO: 6326 - RNA, 19 nt, Artificial Sequence
  Description of Artificial Sequence: Synthetic oligonucleotide
cagcccauugaauaggucc

SEQ ID NO: 6327 - RNA, 19 nt, Artificial Sequence
  Description of Artificial Sequence: Synthetic oligonucleotide
acagcccauugaauagguc

SEQ ID NO: 6328 - RNA, 19 nt, Artificial Sequence
  Description of Artificial Sequence: Synthetic oligonucleotide
aacagcccauugaauaggu

SEQ ID NO: 6329 - RNA, 19 nt, Artificial Sequence
  Description of Artificial Sequence: Synthetic oligonucleotide
caacagcccauugaauagg

SEQ ID NO: 6330 - RNA, 19 nt, Artificial Sequence
  Description of Artificial Sequence: Synthetic oligonucleotide
ccaacagcccauugaauag

SEQ ID NO: 6331 - RNA, 19 nt, Artificial Sequence
  Description of Artificial Sequence: Synthetic oligonucleotide
cccaacagcccauugaaua

SEQ ID NO: 6332 - RNA, 19 nt, Artificial Sequence
  Description of Artificial Sequence: Synthetic oligonucleotide
ucccaacagcccauugaau

SEQ ID NO: 6333 - RNA, 19 nt, Artificial Sequence
  Description of Artificial Sequence: Synthetic oligonucleotide
gucccaacagcccauugaa

SEQ ID NO: 6334 - RNA, 19 nt, Artificial Sequence
  Description of Artificial Sequence: Synthetic oligonucleotide
ggucccaacagcccauuga

SEQ ID NO: 6335 - RNA, 19 nt, Artificial Sequence
  Description of Artificial Sequence: Synthetic oligonucleotide
uggucccaacagcccauug

SEQ ID NO: 6336 - RNA, 19 nt, Artificial Sequence
  Description of Artificial Sequence: Synthetic oligonucleotide
cuggucccaacagcccauu

SEQ ID NO: 6337 - RNA, 19 nt, Artificial Sequence
  Description of Artificial Sequence: Synthetic oligonucleotide
acuggucccaacagcccau

SEQ ID NO: 6338 - RNA, 19 nt, Artificial Sequence
  Description of Artificial Sequence: Synthetic oligonucleotide
uacuggucccaacagccca

SEQ ID NO: 6339 - RNA, 19 nt, Artificial Sequence
  Description of Artificial Sequence: Synthetic oligonucleotide
guacuggucccaacagccc

SEQ ID NO: 6340 - RNA, 19 nt, Artificial Sequence
  Description of Artificial Sequence: Synthetic oligonucleotide
uguacuggucccaacagcc

SEQ ID NO: 6341 - RNA, 19 nt, Artificial Sequence
  Description of Artificial Sequence: Synthetic oligonucleotide
cuguacuggucccaacagc

SEQ ID NO: 6342 - RNA, 19 nt, Artificial Sequence
  Description of Artificial Sequence: Synthetic oligonucleotide
ccuguacuggucccaacag

SEQ ID NO: 6343 - RNA, 19 nt, Artificial Sequence
  Description of Artificial Sequence: Synthetic oligonucleotide
accuguacuggucccaaca

SEQ ID NO: 6344 - RNA, 19 nt, Artificial Sequence
  Description of Artificial Sequence: Synthetic oligonucleotide
gaccuguacuggucccaac

SEQ ID NO: 6345 - RNA, 19 nt, Artificial Sequence
  Description of Artificial Sequence: Synthetic oligonucleotide
ugaccuguacuggucccaa

SEQ ID NO: 6346 - RNA, 19 nt, Artificial Sequence
  Description of Artificial Sequence: Synthetic oligonucleotide
gugaccuguacugguccca

SEQ ID NO: 6347 - RNA, 19 nt, Artificial Sequence
  Description of Artificial Sequence: Synthetic oligonucleotide
agugaccuguacugguccc

SEQ ID NO: 6348 - RNA, 19 nt, Artificial Sequence
  Description of Artificial Sequence: Synthetic oligonucleotide
cagugaccuguacuggucc

SEQ ID NO: 6349 - RNA, 19 nt, Artificial Sequence
  Description of Artificial Sequence: Synthetic oligonucleotide
gcagugaccuguacugguc

SEQ ID NO: 6350 - RNA, 19 nt, Artificial Sequence
  Description of Artificial Sequence: Synthetic oligonucleotide
ugcagugaccuguacuggu

SEQ ID NO: 6351 - RNA, 19 nt, Artificial Sequence
  Description of Artificial Sequence: Synthetic oligonucleotide
augcagugaccuguacugg

SEQ ID NO: 6352 - RNA, 19 nt, Artificial Sequence
  Description of Artificial Sequence: Synthetic oligonucleotide
aaugcagugaccuguacug

SEQ ID NO: 6353 - RNA, 19 nt, Artificial Sequence
  Description of Artificial Sequence: Synthetic oligonucleotide
caaugcagugaccuguacu

SEQ ID NO: 6354 - RNA, 19 nt, Artificial Sequence
  Description of Artificial Sequence: Synthetic oligonucleotide
acaaugcagugaccuguac

SEQ ID NO: 6355 - RNA, 19 nt, Artificial Sequence
  Description of Artificial Sequence: Synthetic oligonucleotide
uacaaugcagugaccugua

SEQ ID NO: 6356 - RNA, 19 nt, Artificial Sequence
  Description of Artificial Sequence: Synthetic oligonucleotide
auacaaugcagugaccugu

SEQ ID NO: 6357 - RNA, 19 nt, Artificial Sequence
  Description of Artificial Sequence: Synthetic oligonucleotide
cauacaaugcagugaccug

SEQ ID NO: 6358 - RNA, 19 nt, Artificial Sequence
  Description of Artificial Sequence: Synthetic oligonucleotide
acauacaaugcagugaccu

SEQ ID NO: 6359 - RNA, 19 nt, Artificial Sequence
  Description of Artificial Sequence: Synthetic oligonucleotide
cacauacaaugcagugacc

SEQ ID NO: 6360 - RNA, 19 nt, Artificial Sequence
  Description of Artificial Sequence: Synthetic oligonucleotide
ucacauacaaugcagugac

SEQ ID NO: 6361 - RNA, 19 nt, Artificial Sequence
  Description of Artificial Sequence: Synthetic oligonucleotide
gucacauacaaugcaguga

SEQ ID NO: 6362 - RNA, 19 nt, Artificial Sequence
  Description of Artificial Sequence: Synthetic oligonucleotide
ugucacauacaaugcagug

SEQ ID NO: 6363 - RNA, 19 nt, Artificial Sequence
  Description of Artificial Sequence: Synthetic oligonucleotide
gugucacauacaaugcagu

SEQ ID NO: 6364 - RNA, 19 nt, Artificial Sequence
  Description of Artificial Sequence: Synthetic oligonucleotide
cgugucacauacaaugcag

SEQ ID NO: 6365 - RNA, 19 nt, Artificial Sequence
  Description of Artificial Sequence: Synthetic oligonucleotide
gcgugucacauacaaugca

SEQ ID NO: 6366 - RNA, 19 nt, Artificial Sequence
  Description of Artificial Sequence: Synthetic oligonucleotide
ggcgugucacauacaaugc

SEQ ID NO: 6367 - RNA, 19 nt, Artificial Sequence
  Description of Artificial Sequence: Synthetic oligonucleotide
aggcgugucacauacaaug

SEQ ID NO: 6368 - RNA, 19 nt, Artificial Sequence
  Description of Artificial Sequence: Synthetic oligonucleotide
aaggcgugucacauacaau

SEQ ID NO: 6369 - RNA, 19 nt, Artificial Sequence
  Description of Artificial Sequence: Synthetic oligonucleotide
caaggcgugucacauacaa

SEQ ID NO: 6370 - RNA, 19 nt, Artificial Sequence
  Description of Artificial Sequence: Synthetic oligonucleotide
ucaaggcgugucacauaca

SEQ ID NO: 6371 - RNA, 19 nt, Artificial Sequence
  Description of Artificial Sequence: Synthetic oligonucleotide
gucaaggcgugucacauac

SEQ ID NO: 6372 - RNA, 19 nt, Artificial Sequence
  Description of Artificial Sequence: Synthetic oligonucleotide
ugucaaggcgugucacaua

SEQ ID NO: 6373 - RNA, 19 nt, Artificial Sequence
  Description of Artificial Sequence: Synthetic oligonucleotide
uugucaaggcgugucacau

SEQ ID NO: 6374 - RNA, 19 nt, Artificial Sequence
  Description of Artificial Sequence: Synthetic oligonucleotide
guugucaaggcgugucaca

SEQ ID NO: 6375 - RNA, 19 nt, Artificial Sequence
  Description of Artificial Sequence: Synthetic oligonucleotide
cguugucaaggcgugucac

SEQ ID NO: 6376 - RNA, 19 nt, Artificial Sequence
  Description of Artificial Sequence: Synthetic oligonucleotide
acguugucaaggcguguca

SEQ ID NO: 6377 - RNA, 19 nt, Artificial Sequence
  Description of Artificial Sequence: Synthetic oligonucleotide
gacguugucaaggcguguc

SEQ ID NO: 6378 - RNA, 19 nt, Artificial Sequence
  Description of Artificial Sequence: Synthetic oligonucleotide
ugacguugucaaggcgugu

SEQ ID NO: 6379 - RNA, 19 nt, Artificial Sequence
  Description of Artificial Sequence: Synthetic oligonucleotide
gugacguugucaaggcgug

SEQ ID NO: 6380 - RNA, 19 nt, Artificial Sequence
  Description of Artificial Sequence: Synthetic oligonucleotide
ugugacguugucaaggcgu

SEQ ID NO: 6381 - RNA, 19 nt, Artificial Sequence
  Description of Artificial Sequence: Synthetic oligonucleotide
cugugacguugucaaggcg

SEQ ID NO: 6382 - RNA, 19 nt, Artificial Sequence
  Description of Artificial Sequence: Synthetic oligonucleotide
acugugacguugucaaggc

SEQ ID NO: 6383 - RNA, 19 nt, Artificial Sequence
  Description of Artificial Sequence: Synthetic oligonucleotide
cacugugacguugucaagg

SEQ ID NO: 6384 - RNA, 19 nt, Artificial Sequence
  Description of Artificial Sequence: Synthetic oligonucleotide
ccacugugacguugucaag

SEQ ID NO: 6385 - RNA, 19 nt, Artificial Sequence
  Description of Artificial Sequence: Synthetic oligonucleotide
gccacugugacguugucaa

SEQ ID NO: 6386 - RNA, 19 nt, Artificial Sequence
  Description of Artificial Sequence: Synthetic oligonucleotide
ugccacugugacguuguca

SEQ ID NO: 6387 - RNA, 19 nt, Artificial Sequence
  Description of Artificial Sequence: Synthetic oligonucleotide
gugccacugugacguuguc

SEQ ID NO: 6388 - RNA, 19 nt, Artificial Sequence
  Description of Artificial Sequence: Synthetic oligonucleotide
ugugccacugugacguugu

SEQ ID NO: 6389 - RNA, 19 nt, Artificial Sequence
  Description of Artificial Sequence: Synthetic oligonucleotide
gugugccacugugacguug

SEQ ID NO: 6390 - RNA, 19 nt, Artificial Sequence
  Description of Artificial Sequence: Synthetic oligonucleotide
ugugugccacugugacguu

SEQ ID NO: 6391 - RNA, 19 nt, Artificial Sequence
  Description of Artificial Sequence: Synthetic oligonucleotide
augugugccacugugacgu

SEQ ID NO: 6392 - RNA, 19 nt, Artificial Sequence
  Description of Artificial Sequence: Synthetic oligonucleotide
caugugugccacugugacg

SEQ ID NO: 6393 - RNA, 19 nt, Artificial Sequence
  Description of Artificial Sequence: Synthetic oligonucleotide
ccaugugugccacugugac

SEQ ID NO: 6394 - RNA, 19 nt, Artificial Sequence
  Description of Artificial Sequence: Synthetic oligonucleotide
cccaugugugccacuguga

SEQ ID NO: 6395 - RNA, 19 nt, Artificial Sequence
  Description of Artificial Sequence: Synthetic oligonucleotide
gcccaugugugccacugug

SEQ ID NO: 6396 - RNA, 19 nt, Artificial Sequence
  Description of Artificial Sequence: Synthetic oligonucleotide
ugcccaugugugccacugu

SEQ ID NO: 6397 - RNA, 19 nt, Artificial Sequence
  Description of Artificial Sequence: Synthetic oligonucleotide
gugcccaugugugccacug

SEQ ID NO: 6398 - RNA, 19 nt, Artificial Sequence
  Description of Artificial Sequence: Synthetic oligonucleotide
ugugcccaugugugccacu

SEQ ID NO: 6399 - RNA, 19 nt, Artificial Sequence
  Description of Artificial Sequence: Synthetic oligonucleotide
uugugcccaugugugccac

SEQ ID NO: 6400 - RNA, 19 nt, Artificial Sequence
  Description of Artificial Sequence: Synthetic oligonucleotide
auugugcccaugugugcca

SEQ ID NO: 6401 - RNA, 19 nt, Artificial Sequence
  Description of Artificial Sequence: Synthetic oligonucleotide
cauugugcccaugugugcc

SEQ ID NO: 6402 - RNA, 19 nt, Artificial Sequence
  Description of Artificial Sequence: Synthetic oligonucleotide
ccauugugcccaugugugc

SEQ ID NO: 6403 - RNA, 19 nt, Artificial Sequence
  Description of Artificial Sequence: Synthetic oligonucleotide
uccauugugcccaugugug

SEQ ID NO: 6404 - RNA, 19 nt, Artificial Sequence
  Description of Artificial Sequence: Synthetic oligonucleotide
auccauugugcccaugugu

SEQ ID NO: 6405 - RNA, 19 nt, Artificial Sequence
  Description of Artificial Sequence: Synthetic oligonucleotide
cauccauugugcccaugug

SEQ ID NO: 6406 - RNA, 19 nt, Artificial Sequence
  Description of Artificial Sequence: Synthetic oligonucleotide
ccauccauugugcccaugu

SEQ ID NO: 6407 - RNA, 19 nt, Artificial Sequence
  Description of Artificial Sequence: Synthetic oligonucleotide
cccauccauugugcccaug

SEQ ID NO: 6408 - RNA, 19 nt, Artificial Sequence
  Description of Artificial Sequence: Synthetic oligonucleotide
gcccauccauugugcccau

SEQ ID NO: 6409 - RNA, 19 nt, Artificial Sequence
  Description of Artificial Sequence: Synthetic oligonucleotide
cgcccauccauugugccca

SEQ ID NO: 6410 - RNA, 19 nt, Artificial Sequence
  Description of Artificial Sequence: Synthetic oligonucleotide
acgcccauccauugugccc

SEQ ID NO: 6411 - RNA, 19 nt, Artificial Sequence
  Description of Artificial Sequence: Synthetic oligonucleotide
uacgcccauccauugugcc

SEQ ID NO: 6412 - RNA, 19 nt, Artificial Sequence
  Description of Artificial Sequence: Synthetic oligonucleotide
auacgcccauccauugugc

SEQ ID NO: 6413 - RNA, 19 nt, Artificial Sequence
  Description of Artificial Sequence: Synthetic oligonucleotide
gauacgcccauccauugug

SEQ ID NO: 6414 - RNA, 19 nt, Artificial Sequence
  Description of Artificial Sequence: Synthetic oligonucleotide
ggauacgcccauccauugu

SEQ ID NO: 6415 - RNA, 19 nt, Artificial Sequence
  Description of Artificial Sequence: Synthetic oligonucleotide
aggauacgcccauccauug

SEQ ID NO: 6416 - RNA, 19 nt, Artificial Sequence
  Description of Artificial Sequence: Synthetic oligonucleotide
caggauacgcccauccauu

SEQ ID NO: 6417 - RNA, 19 nt, Artificial Sequence
  Description of Artificial Sequence: Synthetic oligonucleotide
gcaggauacgcccauccau

SEQ ID NO: 6418 - RNA, 19 nt, Artificial Sequence
  Description of Artificial Sequence: Synthetic oligonucleotide
ugcaggauacgcccaucca

SEQ ID NO: 6419 - RNA, 19 nt, Artificial Sequence
  Description of Artificial Sequence: Synthetic oligonucleotide
cugcaggauacgcccaucc

SEQ ID NO: 6420 - RNA, 19 nt, Artificial Sequence
  Description of Artificial Sequence: Synthetic oligonucleotide
ccugcaggauacgcccauc

SEQ ID NO: 6421 - RNA, 19 nt, Artificial Sequence
  Description of Artificial Sequence: Synthetic oligonucleotide
accugcaggauacgcccau

SEQ ID NO: 6422 - RNA, 19 nt, Artificial Sequence
  Description of Artificial Sequence: Synthetic oligonucleotide
caccugcaggauacgccca

SEQ ID NO: 6423 - RNA, 19 nt, Artificial Sequence
  Description of Artificial Sequence: Synthetic oligonucleotide
ccaccugcaggauacgccc

SEQ ID NO: 6424 - RNA, 19 nt, Artificial Sequence
  Description of Artificial Sequence: Synthetic oligonucleotide
uccaccugcaggauacgcc

SEQ ID NO: 6425 - RNA, 19 nt, Artificial Sequence
  Description of Artificial Sequence: Synthetic oligonucleotide
cuccaccugcaggauacgc

SEQ ID NO: 6426 - RNA, 19 nt, Artificial Sequence
  Description of Artificial Sequence: Synthetic oligonucleotide
gcuccaccugcaggauacg

SEQ ID NO: 6427 - RNA, 19 nt, Artificial Sequence
  Description of Artificial Sequence: Synthetic oligonucleotide
agcuccaccugcaggauac

SEQ ID NO: 6428 - RNA, 19 nt, Artificial Sequence
  Description of Artificial Sequence: Synthetic oligonucleotide
cagcuccaccugcaggaua

SEQ ID NO: 6429 - RNA, 19 nt, Artificial Sequence
  Description of Artificial Sequence: Synthetic oligonucleotide
ccagcuccaccugcaggau

SEQ ID NO: 6430 - RNA, 19 nt, Artificial Sequence
  Description of Artificial Sequence: Synthetic oligonucleotide
accagcuccaccugcagga

SEQ ID NO: 6431 - RNA, 19 nt, Artificial Sequence
  Description of Artificial Sequence: Synthetic oligonucleotide
gaccagcuccaccugcagg

SEQ ID NO: 6432 - RNA, 19 nt, Artificial Sequence
  Description of Artificial Sequence: Synthetic oligonucleotide
ugaccagcuccaccugcag

SEQ ID NO: 6433 - RNA, 19 nt, Artificial Sequence
  Description of Artificial Sequence: Synthetic oligonucleotide
cugaccagcuccaccugca

SEQ ID NO: 6434 - RNA, 19 nt, Artificial Sequence
  Description of Artificial Sequence: Synthetic oligonucleotide
ccugaccagcuccaccugc

SEQ ID NO: 6435 - RNA, 19 nt, Artificial Sequence
  Description of Artificial Sequence: Synthetic oligonucleotide
accugaccagcuccaccug

SEQ ID NO: 6436 - RNA, 19 nt, Artificial Sequence
  Description of Artificial Sequence: Synthetic oligonucleotide
gaccugaccagcuccaccu

SEQ ID NO: 6437 - RNA, 19 nt, Artificial Sequence
  Description of Artificial Sequence: Synthetic oligonucleotide
ugaccugaccagcuccacc

SEQ ID NO: 6438 - RNA, 19 nt, Artificial Sequence
  Description of Artificial Sequence: Synthetic oligonucleotide
gugaccugaccagcuccac

SEQ ID NO: 6439 - RNA, 19 nt, Artificial Sequence
  Description of Artificial Sequence: Synthetic oligonucleotide
agugaccugaccagcucca

SEQ ID NO: 6440 - RNA, 19 nt, Artificial Sequence
  Description of Artificial Sequence: Synthetic oligonucleotide
uagugaccugaccagcucc

SEQ ID NO: 6441 - RNA, 19 nt, Artificial Sequence
  Description of Artificial Sequence: Synthetic oligonucleotide
uuagugaccugaccagcuc

SEQ ID NO: 6442 - RNA, 19 nt, Artificial Sequence
  Description of Artificial Sequence: Synthetic oligonucleotide
uuuagugaccugaccagcu

SEQ ID NO: 6443 - RNA, 19 nt, Artificial Sequence
  Description of Artificial Sequence: Synthetic oligonucleotide
guuuagugaccugaccagc

SEQ ID NO: 6444 - RNA, 19 nt, Artificial Sequence
  Description of Artificial Sequence: Synthetic oligonucleotide
aguuuagugaccugaccag

SEQ ID NO: 6445 - RNA, 19 nt, Artificial Sequence
  Description of Artificial Sequence: Synthetic oligonucleotide
uaguuuagugaccugacca

SEQ ID NO: 6446 - RNA, 19 nt, Artificial Sequence
  Description of Artificial Sequence: Synthetic oligonucleotide
guaguuuagugaccugacc

SEQ ID NO: 6447 - RNA, 19 nt, Artificial Sequence
  Description of Artificial Sequence: Synthetic oligonucleotide
aguaguuuagugaccugac

SEQ ID NO: 6448 - RNA, 19 nt, Artificial Sequence
  Description of Artificial Sequence: Synthetic oligonucleotide
aaguaguuuagugaccuga

SEQ ID NO: 6449 - RNA, 19 nt, Artificial Sequence
  Description of Artificial Sequence: Synthetic oligonucleotide
caaguaguuuagugaccug

SEQ ID NO: 6450 - RNA, 19 nt, Artificial Sequence
  Description of Artificial Sequence: Synthetic oligonucleotide
gcaaguaguuuagugaccu

SEQ ID NO: 6451 - RNA, 19 nt, Artificial Sequence
  Description of Artificial Sequence: Synthetic oligonucleotide
agcaaguaguuuagugacc

SEQ ID NO: 6452 - RNA, 19 nt, Artificial Sequence
  Description of Artificial Sequence: Synthetic oligonucleotide
cagcaaguaguuuagugac

SEQ ID NO: 6453 - RNA, 19 nt, Artificial Sequence
  Description of Artificial Sequence: Synthetic oligonucleotide
acagcaaguaguuuaguga

SEQ ID NO: 6454 - RNA, 19 nt, Artificial Sequence
  Description of Artificial Sequence: Synthetic oligonucleotide
uacagcaaguaguuuagug

SEQ ID NO: 6455 - RNA, 19 nt, Artificial Sequence
  Description of Artificial Sequence: Synthetic oligonucleotide
auacagcaaguaguuuagu

SEQ ID NO: 6456 - RNA, 19 nt, Artificial Sequence
  Description of Artificial Sequence: Synthetic oligonucleotide
cauacagcaaguaguuuag

SEQ ID NO: 6457 - RNA, 19 nt, Artificial Sequence
  Description of Artificial Sequence: Synthetic oligonucleotide
acauacagcaaguaguuua

SEQ ID NO: 6458 - RNA, 19 nt, Artificial Sequence
  Description of Artificial Sequence: Synthetic oligonucleotide
cacauacagcaaguaguuu

SEQ ID NO: 6459 - RNA, 19 nt, Artificial Sequence
  Description of Artificial Sequence: Synthetic oligonucleotide
acacauacagcaaguaguu

SEQ ID NO: 6460 - RNA, 19 nt, Artificial Sequence
  Description of Artificial Sequence: Synthetic oligonucleotide
gacacauacagcaaguagu

SEQ ID NO: 6461 - RNA, 19 nt, Artificial Sequence
  Description of Artificial Sequence: Synthetic oligonucleotide
ggacacauacagcaaguag

SEQ ID NO: 6462 - RNA, 19 nt, Artificial Sequence
  Description of Artificial Sequence: Synthetic oligonucleotide
uggacacauacagcaagua

SEQ ID NO: 6463 - RNA, 19 nt, Artificial Sequence
  Description of Artificial Sequence: Synthetic oligonucleotide
uuggacacauacagcaagu

SEQ ID NO: 6464 - RNA, 19 nt, Artificial Sequence
  Description of Artificial Sequence: Synthetic oligonucleotide
guuggacacauacagcaag

SEQ ID NO: 6465 - RNA, 19 nt, Artificial Sequence
  Description of Artificial Sequence: Synthetic oligonucleotide
aguuggacacauacagcaa

SEQ ID NO: 6466 - RNA, 19 nt, Artificial Sequence
  Description of Artificial Sequence: Synthetic oligonucleotide
aaguuggacacauacagca

SEQ ID NO: 6467 - RNA, 19 nt, Artificial Sequence
  Description of Artificial Sequence: Synthetic oligonucleotide
gaaguuggacacauacagc

SEQ ID NO: 6468 - RNA, 19 nt, Artificial Sequence
  Description of Artificial Sequence: Synthetic oligonucleotide
agaaguuggacacauacag

SEQ ID NO: 6469 - RNA, 19 nt, Artificial Sequence
  Description of Artificial Sequence: Synthetic oligonucleotide
gagaaguuggacacauaca

SEQ ID NO: 6470 - RNA, 19 nt, Artificial Sequence
  Description of Artificial Sequence: Synthetic oligonucleotide
ugagaaguuggacacauac

SEQ ID NO: 6471 - RNA, 19 nt, Artificial Sequence
  Description of Artificial Sequence: Synthetic oligonucleotide
gugagaaguuggacacaua

SEQ ID NO: 6472 - RNA, 19 nt, Artificial Sequence
  Description of Artificial Sequence: Synthetic oligonucleotide
agugagaaguuggacacau

SEQ ID NO: 6473 - RNA, 19 nt, Artificial Sequence
  Description of Artificial Sequence: Synthetic oligonucleotide
cagugagaaguuggacaca

SEQ ID NO: 6474 - RNA, 19 nt, Artificial Sequence
  Description of Artificial Sequence: Synthetic oligonucleotide
ccagugagaaguuggacac

SEQ ID NO: 6475 - RNA, 19 nt, Artificial Sequence
  Description of Artificial Sequence: Synthetic oligonucleotide
cccagugagaaguuggaca

SEQ ID NO: 6476 - RNA, 19 nt, Artificial Sequence
  Description of Artificial Sequence: Synthetic oligonucleotide
acccagugagaaguuggac

SEQ ID NO: 6477 - RNA, 19 nt, Artificial Sequence
  Description of Artificial Sequence: Synthetic oligonucleotide
cacccagugagaaguugga

SEQ ID NO: 6478 - RNA, 19 nt, Artificial Sequence
  Description of Artificial Sequence: Synthetic oligonucleotide
ucacccagugagaaguugg

SEQ ID NO: 6479 - RNA, 19 nt, Artificial Sequence
  Description of Artificial Sequence: Synthetic oligonucleotide
gucacccagugagaaguug

SEQ ID NO: 6480 - RNA, 19 nt, Artificial Sequence
  Description of Artificial Sequence: Synthetic oligonucleotide
ugucacccagugagaaguu

SEQ ID NO: 6481 - RNA, 19 nt, Artificial Sequence
  Description of Artificial Sequence: Synthetic oligonucleotide
cugucacccagugagaagu

SEQ ID NO: 6482 - RNA, 19 nt, Artificial Sequence
  Description of Artificial Sequence: Synthetic oligonucleotide
acugucacccagugagaag

SEQ ID NO: 6483 - RNA, 19 nt, Artificial Sequence
  Description of Artificial Sequence: Synthetic oligonucleotide
cacugucacccagugagaa

SEQ ID NO: 6484 - RNA, 19 nt, Artificial Sequence
  Description of Artificial Sequence: Synthetic oligonucleotide
ccacugucacccagugaga

SEQ ID NO: 6485 - RNA, 19 nt, Artificial Sequence
  Description of Artificial Sequence: Synthetic oligonucleotide
cccacugucacccagugag

SEQ ID NO: 6486 - RNA, 19 nt, Artificial Sequence
  Description of Artificial Sequence: Synthetic oligonucleotide
gcccacugucacccaguga

SEQ ID NO: 6487 - RNA, 19 nt, Artificial Sequence
  Description of Artificial Sequence: Synthetic oligonucleotide
ugcccacugucacccagug

SEQ ID NO: 6488 - RNA, 19 nt, Artificial Sequence
  Description of Artificial Sequence: Synthetic oligonucleotide
cugcccacugucacccagu

SEQ ID NO: 6489 - RNA, 19 nt, Artificial Sequence
  Description of Artificial Sequence: Synthetic oligonucleotide
gcugcccacugucacccag

SEQ ID NO: 6490 - RNA, 19 nt, Artificial Sequence
  Description of Artificial Sequence: Synthetic oligonucleotide
ggcugcccacugucaccca

SEQ ID NO: 6491 - RNA, 19 nt, Artificial Sequence
  Description of Artificial Sequence: Synthetic oligonucleotide
gggcugcccacugucaccc

SEQ ID NO: 6492 - RNA, 19 nt, Artificial Sequence
  Description of Artificial Sequence: Synthetic oligonucleotide
cgggcugcccacugucacc

SEQ ID NO: 6493 - RNA, 19 nt, Artificial Sequence
  Description of Artificial Sequence: Synthetic oligonucleotide
acgggcugcccacugucac

SEQ ID NO: 6494 - RNA, 19 nt, Artificial Sequence
  Description of Artificial Sequence: Synthetic oligonucleotide
cacgggcugcccacuguca

SEQ ID NO: 6495 - RNA, 19 nt, Artificial Sequence
  Description of Artificial Sequence: Synthetic oligonucleotide
gcacgggcugcccacuguc

SEQ ID NO: 6496 - RNA, 19 nt, Artificial Sequence
  Description of Artificial Sequence: Synthetic oligonucleotide
ugcacgggcugcccacugu

SEQ ID NO: 6497 - RNA, 19 nt, Artificial Sequence
  Description of Artificial Sequence: Synthetic oligonucleotide
cugcacgggcugcccacug

SEQ ID NO: 6498 - RNA, 19 nt, Artificial Sequence
  Description of Artificial Sequence: Synthetic oligonucleotide
gcugcacgggcugcccacu

SEQ ID NO: 6499 - RNA, 19 nt, Artificial Sequence
  Description of Artificial Sequence: Synthetic oligonucleotide
cgcugcacgggcugcccac

SEQ ID NO: 6500 - RNA, 19 nt, Artificial Sequence
  Description of Artificial Sequence: Synthetic oligonucleotide
ccgcugcacgggcugccca

SEQ ID NO: 6501 - RNA, 19 nt, Artificial Sequence
  Description of Artificial Sequence: Synthetic oligonucleotide
cccgcugcacgggcugccc

SEQ ID NO: 6502 - RNA, 19 nt, Artificial Sequence
  Description of Artificial Sequence: Synthetic oligonucleotide
ucccgcugcacgggcugcc

SEQ ID NO: 6503 - RNA, 19 nt, Artificial Sequence
  Description of Artificial Sequence: Synthetic oligonucleotide
aucccgcugcacgggcugc

SEQ ID NO: 6504 - RNA, 19 nt, Artificial Sequence
  Description of Artificial Sequence: Synthetic oligonucleotide
caucccgcugcacgggcug

SEQ ID NO: 6505 - RNA, 19 nt, Artificial Sequence
  Description of Artificial Sequence: Synthetic oligonucleotide
acaucccgcugcacgggcu

SEQ ID NO: 6506 - RNA, 19 nt, Artificial Sequence
  Description of Artificial Sequence: Synthetic oligonucleotide
gacaucccgcugcacgggc

SEQ ID NO: 6507 - RNA, 19 nt, Artificial Sequence
  Description of Artificial Sequence: Synthetic oligonucleotide
ugacaucccgcugcacggg

SEQ ID NO: 6508 - RNA, 19 nt, Artificial Sequence
  Description of Artificial Sequence: Synthetic oligonucleotide
cugacaucccgcugcacgg

SEQ ID NO: 6509 - RNA, 19 nt, Artificial Sequence
  Description of Artificial Sequence: Synthetic oligonucleotide
acugacaucccgcugcacg

SEQ ID NO: 6510 - RNA, 19 nt, Artificial Sequence
  Description of Artificial Sequence: Synthetic oligonucleotide
gacugacaucccgcugcac

SEQ ID NO: 6511 - RNA, 19 nt, Artificial Sequence
  Description of Artificial Sequence: Synthetic oligonucleotide
cgacugacaucccgcugca

SEQ ID NO: 6512 - RNA, 19 nt, Artificial Sequence
  Description of Artificial Sequence: Synthetic oligonucleotide
acgacugacaucccgcugc

SEQ ID NO: 6513 - RNA, 19 nt, Artificial Sequence
  Description of Artificial Sequence: Synthetic oligonucleotide
gacgacugacaucccgcug

SEQ ID NO: 6514 - RNA, 19 nt, Artificial Sequence
  Description of Artificial Sequence: Synthetic oligonucleotide
agacgacugacaucccgcu

SEQ ID NO: 6515 - RNA, 19 nt, Artificial Sequence
  Description of Artificial Sequence: Synthetic oligonucleotide
aagacgacugacaucccgc

SEQ ID NO: 6516 - RNA, 19 nt, Artificial Sequence
  Description of Artificial Sequence: Synthetic oligonucleotide
caagacgacugacaucccg

SEQ ID NO: 6517 - RNA, 19 nt, Artificial Sequence
  Description of Artificial Sequence: Synthetic oligonucleotide
ccaagacgacugacauccc

SEQ ID NO: 6518 - RNA, 19 nt, Artificial Sequence
  Description of Artificial Sequence: Synthetic oligonucleotide
cccaagacgacugacaucc

SEQ ID NO: 6519 - RNA, 19 nt, Artificial Sequence
  Description of Artificial Sequence: Synthetic oligonucleotide
ccccaagacgacugacauc

SEQ ID NO: 6520 - RNA, 19 nt, Artificial Sequence
  Description of Artificial Sequence: Synthetic oligonucleotide
uccccaagacgacugacau

SEQ ID NO: 6521 - RNA, 19 nt, Artificial Sequence
  Description of Artificial Sequence: Synthetic oligonucleotide
guccccaagacgacugaca

SEQ ID NO: 6522 - RNA, 19 nt, Artificial Sequence
  Description of Artificial Sequence: Synthetic oligonucleotide
gguccccaagacgacugac

SEQ ID NO: 6523 - RNA, 19 nt, Artificial Sequence
  Description of Artificial Sequence: Synthetic oligonucleotide
ugguccccaagacgacuga

SEQ ID NO: 6524 - RNA, 19 nt, Artificial Sequence
  Description of Artificial Sequence: Synthetic oligonucleotide
gugguccccaagacgacug

SEQ ID NO: 6525 - RNA, 19 nt, Artificial Sequence
  Description of Artificial Sequence: Synthetic oligonucleotide
ggugguccccaagacgacu

SEQ ID NO: 6526 - RNA, 19 nt, Artificial Sequence
  Description of Artificial Sequence: Synthetic oligonucleotide
aggugguccccaagacgac

SEQ ID NO: 6527 - RNA, 19 nt, Artificial Sequence
  Description of Artificial Sequence: Synthetic oligonucleotide
uaggugguccccaagacga

SEQ ID NO: 6528 - RNA, 19 nt, Artificial Sequence
  Description of Artificial Sequence: Synthetic oligonucleotide
guaggugguccccaagacg

SEQ ID NO: 6529 - RNA, 19 nt, Artificial Sequence
  Description of Artificial Sequence: Synthetic oligonucleotide
aguaggugguccccaagac

SEQ ID NO: 6530 - RNA, 19 nt, Artificial Sequence
  Description of Artificial Sequence: Synthetic oligonucleotide
gaguaggugguccccaaga

SEQ ID NO: 6531 - RNA, 19 nt, Artificial Sequence
  Description of Artificial Sequence: Synthetic oligonucleotide
agaguaggugguccccaag

SEQ ID NO: 6532 - RNA, 19 nt, Artificial Sequence
  Description of Artificial Sequence: Synthetic oligonucleotide
aagaguaggugguccccaa

SEQ ID NO: 6533 - RNA, 19 nt, Artificial Sequence
  Description of Artificial Sequence: Synthetic oligonucleotide
aaagaguagguggucccca

SEQ ID NO: 6534 - RNA, 19 nt, Artificial Sequence
  Description of Artificial Sequence: Synthetic oligonucleotide
caaagaguagguggucccc

SEQ ID NO: 6535 - RNA, 19 nt, Artificial Sequence
  Description of Artificial Sequence: Synthetic oligonucleotide
gcaaagaguaggugguccc

SEQ ID NO: 6536 - RNA, 19 nt, Artificial Sequence
  Description of Artificial Sequence: Synthetic oligonucleotide
ggcaaagaguagguggucc

SEQ ID NO: 6537 - RNA, 19 nt, Artificial Sequence
  Description of Artificial Sequence: Synthetic oligonucleotide
aggcaaagaguaggugguc

SEQ ID NO: 6538 - RNA, 19 nt, Artificial Sequence
  Description of Artificial Sequence: Synthetic oligonucleotide
gaggcaaagaguagguggu

SEQ ID NO: 6539 - RNA, 19 nt, Artificial Sequence
  Description of Artificial Sequence: Synthetic oligonucleotide
agaggcaaagaguaggugg

SEQ ID NO: 6540 - RNA, 19 nt, Artificial Sequence
  Description of Artificial Sequence: Synthetic oligonucleotide
cagaggcaaagaguaggug

SEQ ID NO: 6541 - RNA, 19 nt, Artificial Sequence
  Description of Artificial Sequence: Synthetic oligonucleotide
ccagaggcaaagaguaggu

SEQ ID NO: 6542 - RNA, 19 nt, Artificial Sequence
  Description of Artificial Sequence: Synthetic oligonucleotide
cccagaggcaaagaguagg

SEQ ID NO: 6543 - RNA, 19 nt, Artificial Sequence
  Description of Artificial Sequence: Synthetic oligonucleotide
ccccagaggcaaagaguag

SEQ ID NO: 6544 - RNA, 19 nt, Artificial Sequence
  Description of Artificial Sequence: Synthetic oligonucleotide
uccccagaggcaaagagua

SEQ ID NO: 6545 - RNA, 19 nt, Artificial Sequence
  Description of Artificial Sequence: Synthetic oligonucleotide
guccccagaggcaaagagu

SEQ ID NO: 6546 - RNA, 19 nt, Artificial Sequence
  Description of Artificial Sequence: Synthetic oligonucleotide
gguccccagaggcaaagag

SEQ ID NO: 6547 - RNA, 19 nt, Artificial Sequence
  Description of Artificial Sequence: Synthetic oligonucleotide
ugguccccagaggcaaaga

SEQ ID NO: 6548 - RNA, 19 nt, Artificial Sequence
  Description of Artificial Sequence: Synthetic oligonucleotide
cugguccccagaggcaaag

SEQ ID NO: 6549 - RNA, 19 nt, Artificial Sequence
  Description of Artificial Sequence: Synthetic oligonucleotide
ccugguccccagaggcaaa

SEQ ID NO: 6550 - RNA, 19 nt, Artificial Sequence
  Description of Artificial Sequence: Synthetic oligonucleotide
accugguccccagaggcaa

SEQ ID NO: 6551 - RNA, 19 nt, Artificial Sequence
  Description of Artificial Sequence: Synthetic oligonucleotide
aaccugguccccagaggca

SEQ ID NO: 6552 - RNA, 19 nt, Artificial Sequence
  Description of Artificial Sequence: Synthetic oligonucleotide
aaaccugguccccagaggc

SEQ ID NO: 6553 - RNA, 19 nt, Artificial Sequence
  Description of Artificial Sequence: Synthetic oligonucleotide
aaaaccugguccccagagg

SEQ ID NO: 6554 - RNA, 19 nt, Artificial Sequence
  Description of Artificial Sequence: Synthetic oligonucleotide
gaaaaccugguccccagag

SEQ ID NO: 6555 - RNA, 19 nt, Artificial Sequence
  Description of Artificial Sequence: Synthetic oligonucleotide
ggaaaaccugguccccaga

SEQ ID NO: 6556 - RNA, 19 nt, Artificial Sequence
  Description of Artificial Sequence: Synthetic oligonucleotide
uggaaaaccugguccccag

SEQ ID NO: 6557 - RNA, 19 nt, Artificial Sequence
  Description of Artificial Sequence: Synthetic oligonucleotide
cuggaaaaccuggucccca

SEQ ID NO: 6558 - RNA, 19 nt, Artificial Sequence
  Description of Artificial Sequence: Synthetic oligonucleotide
ccuggaaaaccuggucccc

SEQ ID NO: 6559 - RNA, 19 nt, Artificial Sequence
  Description of Artificial Sequence: Synthetic oligonucleotide
accuggaaaaccugguccc

SEQ ID NO: 6560 - RNA, 19 nt, Artificial Sequence
  Description of Artificial Sequence: Synthetic oligonucleotide
uaccuggaaaaccuggucc

SEQ ID NO: 6561 - RNA, 19 nt, Artificial Sequence
  Description of Artificial Sequence: Synthetic oligonucleotide
guaccuggaaaaccugguc

SEQ ID NO: 6562 - RNA, 19 nt, Artificial Sequence
  Description of Artificial Sequence: Synthetic oligonucleotide
gguaccuggaaaaccuggu

SEQ ID NO: 6563 - RNA, 19 nt, Artificial Sequence
  Description of Artificial Sequence: Synthetic oligonucleotide
agguaccuggaaaaccugg

SEQ ID NO: 6564 - RNA, 19 nt, Artificial Sequence
  Description of Artificial Sequence: Synthetic oligonucleotide
uagguaccuggaaaaccug

SEQ ID NO: 6565 - RNA, 19 nt, Artificial Sequence
  Description of Artificial Sequence: Synthetic oligonucleotide
auagguaccuggaaaaccu

SEQ ID NO: 6566 - RNA, 19 nt, Artificial Sequence
  Description of Artificial Sequence: Synthetic oligonucleotide
gauagguaccuggaaaacc

SEQ ID NO: 6567 - RNA, 19 nt, Artificial Sequence
  Description of Artificial Sequence: Synthetic oligonucleotide
ggauagguaccuggaaaac

SEQ ID NO: 6568 - RNA, 19 nt, Artificial Sequence
  Description of Artificial Sequence: Synthetic oligonucleotide
uggauagguaccuggaaaa

SEQ ID NO: 6569 - RNA, 19 nt, Artificial Sequence
  Description of Artificial Sequence: Synthetic oligonucleotide
uuggauagguaccuggaaa

SEQ ID NO: 6570 - RNA, 19 nt, Artificial Sequence
  Description of Artificial Sequence: Synthetic oligonucleotide
cuuggauagguaccuggaa

SEQ ID NO: 6571 - RNA, 19 nt, Artificial Sequence
  Description of Artificial Sequence: Synthetic oligonucleotide
ccuuggauagguaccugga

SEQ ID NO: 6572 - RNA, 19 nt, Artificial Sequence
  Description of Artificial Sequence: Synthetic oligonucleotide
gccuuggauagguaccugg

SEQ ID NO: 6573 - RNA, 19 nt, Artificial Sequence
  Description of Artificial Sequence: Synthetic oligonucleotide
ggccuuggauagguaccug

SEQ ID NO: 6574 - RNA, 19 nt, Artificial Sequence
  Description of Artificial Sequence: Synthetic oligonucleotide
gggccuuggauagguaccu

SEQ ID NO: 6575 - RNA, 19 nt, Artificial Sequence
  Description of Artificial Sequence: Synthetic oligonucleotide
agggccuuggauagguacc

SEQ ID NO: 6576 - RNA, 19 nt, Artificial Sequence
  Description of Artificial Sequence: Synthetic oligonucleotide
cagggccuuggauagguac

SEQ ID NO: 6577 - RNA, 19 nt, Artificial Sequence
  Description of Artificial Sequence: Synthetic oligonucleotide
ccagggccuuggauaggua

SEQ ID NO: 6578 - RNA, 19 nt, Artificial Sequence
  Description of Artificial Sequence: Synthetic oligonucleotide
gccagggccuuggauaggu

SEQ ID NO: 6579 - RNA, 19 nt, Artificial Sequence
  Description of Artificial Sequence: Synthetic oligonucleotide
agccagggccuuggauagg

SEQ ID NO: 6580 - RNA, 19 nt, Artificial Sequence
  Description of Artificial Sequence: Synthetic oligonucleotide
cagccagggccuuggauag

SEQ ID NO: 6581 - RNA, 19 nt, Artificial Sequence
  Description of Artificial Sequence: Synthetic oligonucleotide
gcagccagggccuuggaua

SEQ ID NO: 6582 - RNA, 19 nt, Artificial Sequence
  Description of Artificial Sequence: Synthetic oligonucleotide
ggcagccagggccuuggau

SEQ ID NO: 6583 - RNA, 19 nt, Artificial Sequence
  Description of Artificial Sequence: Synthetic oligonucleotide
cggcagccagggccuugga

SEQ ID NO: 6584 - RNA, 19 nt, Artificial Sequence
  Description of Artificial Sequence: Synthetic oligonucleotide
gcggcagccagggccuugg

SEQ ID NO: 6585 - RNA, 19 nt, Artificial Sequence
  Description of Artificial Sequence: Synthetic oligonucleotide
ggcggcagccagggccuug

SEQ ID NO: 6586 - RNA, 19 nt, Artificial Sequence
  Description of Artificial Sequence: Synthetic oligonucleotide
uggcggcagccagggccuu

SEQ ID NO: 6587 - RNA, 19 nt, Artificial Sequence
  Description of Artificial Sequence: Synthetic oligonucleotide
guggcggcagccagggccu

SEQ ID NO: 6588 - RNA, 19 nt, Artificial Sequence
  Description of Artificial Sequence: Synthetic oligonucleotide
aguggcggcagccagggcc

SEQ ID NO: 6589 - RNA, 19 nt, Artificial Sequence
  Description of Artificial Sequence: Synthetic oligonucleotide
aaguggcggcagccagggc

SEQ ID NO: 6590 - RNA, 19 nt, Artificial Sequence
  Description of Artificial Sequence: Synthetic oligonucleotide
gaaguggcggcagccaggg

SEQ ID NO: 6591 - RNA, 19 nt, Artificial Sequence
  Description of Artificial Sequence: Synthetic oligonucleotide
ggaaguggcggcagccagg

SEQ ID NO: 6592 - RNA, 19 nt, Artificial Sequence
  Description of Artificial Sequence: Synthetic oligonucleotide
aggaaguggcggcagccag

SEQ ID NO: 6593 - RNA, 19 nt, Artificial Sequence
  Description of Artificial Sequence: Synthetic oligonucleotide
caggaaguggcggcagcca

SEQ ID NO: 6594 - RNA, 19 nt, Artificial Sequence
  Description of Artificial Sequence: Synthetic oligonucleotide
ucaggaaguggcggcagcc

SEQ ID NO: 6595 - RNA, 19 nt, Artificial Sequence
  Description of Artificial Sequence: Synthetic oligonucleotide
gucaggaaguggcggcagc

SEQ ID NO: 6596 - RNA, 19 nt, Artificial Sequence
  Description of Artificial Sequence: Synthetic oligonucleotide
ggucaggaaguggcggcag

SEQ ID NO: 6597 - RNA, 19 nt, Artificial Sequence
  Description of Artificial Sequence: Synthetic oligonucleotide
aggucaggaaguggcggca

SEQ ID NO: 6598 - RNA, 19 nt, Artificial Sequence
  Description of Artificial Sequence: Synthetic oligonucleotide
caggucaggaaguggcggc

SEQ ID NO: 6599 - RNA, 19 nt, Artificial Sequence
  Description of Artificial Sequence: Synthetic oligonucleotide
acaggucaggaaguggcgg

SEQ ID NO: 6600 - RNA, 19 nt, Artificial Sequence
  Description of Artificial Sequence: Synthetic oligonucleotide
cacaggucaggaaguggcg

SEQ ID NO: 6601 - RNA, 19 nt, Artificial Sequence
  Description of Artificial Sequence: Synthetic oligonucleotide
ccacaggucaggaaguggc

SEQ ID NO: 6602 - RNA, 19 nt, Artificial Sequence
  Description of Artificial Sequence: Synthetic oligonucleotide
cccacaggucaggaagugg

SEQ ID NO: 6603 - RNA, 19 nt, Artificial Sequence
  Description of Artificial Sequence: Synthetic oligonucleotide
gcccacaggucaggaagug

SEQ ID NO: 6604 - RNA, 19 nt, Artificial Sequence
  Description of Artificial Sequence: Synthetic oligonucleotide
cgcccacaggucaggaagu

SEQ ID NO: 6605 - RNA, 19 nt, Artificial Sequence
  Description of Artificial Sequence: Synthetic oligonucleotide
acgcccacaggucaggaag

SEQ ID NO: 6606 - RNA, 19 nt, Artificial Sequence
  Description of Artificial Sequence: Synthetic oligonucleotide
aacgcccacaggucaggaa

SEQ ID NO: 6607 - RNA, 19 nt, Artificial Sequence
  Description of Artificial Sequence: Synthetic oligonucleotide
caacgcccacaggucagga

SEQ ID NO: 6608 - RNA, 19 nt, Artificial Sequence
  Description of Artificial Sequence: Synthetic oligonucleotide
gcaacgcccacaggucagg

SEQ ID NO: 6609 - RNA, 19 nt, Artificial Sequence
  Description of Artificial Sequence: Synthetic oligonucleotide
ggcaacgcccacaggucag

SEQ ID NO: 6610 - RNA, 19 nt, Artificial Sequence
  Description of Artificial Sequence: Synthetic oligonucleotide
aggcaacgcccacagguca

SEQ ID NO: 6611 - RNA, 19 nt, Artificial Sequence
  Description of Artificial Sequence: Synthetic oligonucleotide
uaggcaacgcccacagguc

SEQ ID NO: 6612 - RNA, 19 nt, Artificial Sequence
  Description of Artificial Sequence: Synthetic oligonucleotide
uuaggcaacgcccacaggu

SEQ ID NO: 6613 - RNA, 19 nt, Artificial Sequence
  Description of Artificial Sequence: Synthetic oligonucleotide
cuuaggcaacgcccacagg

SEQ ID NO: 6614 - RNA, 19 nt, Artificial Sequence
  Description of Artificial Sequence: Synthetic oligonucleotide
ccuuaggcaacgcccacag

SEQ ID NO: 6615 - RNA, 19 nt, Artificial Sequence
  Description of Artificial Sequence: Synthetic oligonucleotide
cccuuaggcaacgcccaca

SEQ ID NO: 6616 - RNA, 19 nt, Artificial Sequence
  Description of Artificial Sequence: Synthetic oligonucleotide
gcccuuaggcaacgcccac

SEQ ID NO: 6617 - RNA, 19 nt, Artificial Sequence
  Description of Artificial Sequence: Synthetic oligonucleotide
ugcccuuaggcaacgccca

SEQ ID NO: 6618 - RNA, 19 nt, Artificial Sequence
  Description of Artificial Sequence: Synthetic oligonucleotide
augcccuuaggcaacgccc

SEQ ID NO: 6619 - RNA, 19 nt, Artificial Sequence
  Description of Artificial Sequence: Synthetic oligonucleotide
caugcccuuaggcaacgcc

SEQ ID NO: 6620 - RNA, 19 nt, Artificial Sequence
  Description of Artificial Sequence: Synthetic oligonucleotide
ccaugcccuuaggcaacgc

SEQ ID NO: 6621 - RNA, 19 nt, Artificial Sequence
  Description of Artificial Sequence: Synthetic oligonucleotide
gccaugcccuuaggcaacg

SEQ ID NO: 6622 - RNA, 19 nt, Artificial Sequence
  Description of Artificial Sequence: Synthetic oligonucleotide
ugccaugcccuuaggcaac

SEQ ID NO: 6623 - RNA, 19 nt, Artificial Sequence
  Description of Artificial Sequence: Synthetic oligonucleotide
augccaugcccuuaggcaa

SEQ ID NO: 6624 - RNA, 19 nt, Artificial Sequence
  Description of Artificial Sequence: Synthetic oligonucleotide
aaugccaugcccuuaggca

SEQ ID NO: 6625 - RNA, 19 nt, Artificial Sequence
  Description of Artificial Sequence: Synthetic oligonucleotide
aaaugccaugcccuuaggc

SEQ ID NO: 6626 - RNA, 19 nt, Artificial Sequence
  Description of Artificial Sequence: Synthetic oligonucleotide
gaaaugccaugcccuuagg

SEQ ID NO: 6627 - RNA, 19 nt, Artificial Sequence
  Description of Artificial Sequence: Synthetic oligonucleotide
ugaaaugccaugcccuuag

SEQ ID NO: 6628 - RNA, 19 nt, Artificial Sequence
  Description of Artificial Sequence: Synthetic oligonucleotide
augaaaugccaugcccuua

SEQ ID NO: 6629 - RNA, 19 nt, Artificial Sequence
  Description of Artificial Sequence: Synthetic oligonucleotide
caugaaaugccaugcccuu

SEQ ID NO: 6630 - RNA, 19 nt, Artificial Sequence
  Description of Artificial Sequence: Synthetic oligonucleotide
ccaugaaaugccaugcccu

SEQ ID NO: 6631 - RNA, 19 nt, Artificial Sequence
  Description of Artificial Sequence: Synthetic oligonucleotide
cccaugaaaugccaugccc

SEQ ID NO: 6632 - RNA, 19 nt, Artificial Sequence
  Description of Artificial Sequence: Synthetic oligonucleotide
gcccaugaaaugccaugcc

SEQ ID NO: 6633 - RNA, 19 nt, Artificial Sequence
  Description of Artificial Sequence: Synthetic oligonucleotide
agcccaugaaaugccaugc

SEQ ID NO: 6634 - RNA, 19 nt, Artificial Sequence
  Description of Artificial Sequence: Synthetic oligonucleotide
cagcccaugaaaugccaug

SEQ ID NO: 6635 - RNA, 19 nt, Artificial Sequence
  Description of Artificial Sequence: Synthetic oligonucleotide
acagcccaugaaaugccau

SEQ ID NO: 6636 - RNA, 19 nt, Artificial Sequence
  Description of Artificial Sequence: Synthetic oligonucleotide
cacagcccaugaaaugcca

SEQ ID NO: 6637 - RNA, 19 nt, Artificial Sequence
  Description of Artificial Sequence: Synthetic oligonucleotide
ccacagcccaugaaaugcc

SEQ ID NO: 6638 - RNA, 19 nt, Artificial Sequence
  Description of Artificial Sequence: Synthetic oligonucleotide
gccacagcccaugaaaugc

SEQ ID NO: 6639 - RNA, 19 nt, Artificial Sequence
  Description of Artificial Sequence: Synthetic oligonucleotide
agccacagcccaugaaaug

SEQ ID NO: 6640 - RNA, 19 nt, Artificial Sequence
  Description of Artificial Sequence: Synthetic oligonucleotide
cagccacagcccaugaaau

SEQ ID NO: 6641 - RNA, 19 nt, Artificial Sequence
  Description of Artificial Sequence: Synthetic oligonucleotide
ccagccacagcccaugaaa

SEQ ID NO: 6642 - RNA, 19 nt, Artificial Sequence
  Description of Artificial Sequence: Synthetic oligonucleotide
accagccacagcccaugaa

SEQ ID NO: 6643 - RNA, 19 nt, Artificial Sequence
  Description of Artificial Sequence: Synthetic oligonucleotide
caccagccacagcccauga

SEQ ID NO: 6644 - RNA, 19 nt, Artificial Sequence
  Description of Artificial Sequence: Synthetic oligonucleotide
acaccagccacagcccaug

SEQ ID NO: 6645 - RNA, 19 nt, Artificial Sequence
  Description of Artificial Sequence: Synthetic oligonucleotide
cacaccagccacagcccau

SEQ ID NO: 6646 - RNA, 19 nt, Artificial Sequence
  Description of Artificial Sequence: Synthetic oligonucleotide
ccacaccagccacagccca

SEQ ID NO: 6647 - RNA, 19 nt, Artificial Sequence
  Description of Artificial Sequence: Synthetic oligonucleotide
cccacaccagccacagccc

SEQ ID NO: 6648 - RNA, 19 nt, Artificial Sequence
  Description of Artificial Sequence: Synthetic oligonucleotide
ucccacaccagccacagcc

SEQ ID NO: 6649 - RNA, 19 nt, Artificial Sequence
  Description of Artificial Sequence: Synthetic oligonucleotide
uucccacaccagccacagc

SEQ ID NO: 6650 - RNA, 19 nt, Artificial Sequence
  Description of Artificial Sequence: Synthetic oligonucleotide
guucccacaccagccacag

SEQ ID NO: 6651 - RNA, 19 nt, Artificial Sequence
  Description of Artificial Sequence: Synthetic oligonucleotide
uguucccacaccagccaca

SEQ ID NO: 6652 - RNA, 19 nt, Artificial Sequence
  Description of Artificial Sequence: Synthetic oligonucleotide
auguucccacaccagccac

SEQ ID NO: 6653 - RNA, 19 nt, Artificial Sequence
  Description of Artificial Sequence: Synthetic oligonucleotide
cauguucccacaccagcca

SEQ ID NO: 6654 - RNA, 19 nt, Artificial Sequence
  Description of Artificial Sequence: Synthetic oligonucleotide
acauguucccacaccagcc

SEQ ID NO: 6655 - RNA, 19 nt, Artificial Sequence
  Description of Artificial Sequence: Synthetic oligonucleotide
cacauguucccacaccagc

SEQ ID NO: 6656 - RNA, 19 nt, Artificial Sequence
  Description of Artificial Sequence: Synthetic oligonucleotide
gcacauguucccacaccag

SEQ ID NO: 6657 - RNA, 19 nt, Artificial Sequence
  Description of Artificial Sequence: Synthetic oligonucleotide
cgcacauguucccacacca

SEQ ID NO: 6658 - RNA, 19 nt, Artificial Sequence
  Description of Artificial Sequence: Synthetic oligonucleotide
ccgcacauguucccacacc

SEQ ID NO: 6659 - RNA, 19 nt, Artificial Sequence
  Description of Artificial Sequence: Synthetic oligonucleotide
gccgcacauguucccacac

SEQ ID NO: 6660 - RNA, 19 nt, Artificial Sequence
  Description of Artificial Sequence: Synthetic oligonucleotide
ggccgcacauguucccaca

SEQ ID NO: 6661 - RNA, 19 nt, Artificial Sequence
  Description of Artificial Sequence: Synthetic oligonucleotide
uggccgcacauguucccac

SEQ ID NO: 6662 - RNA, 19 nt, Artificial Sequence
  Description of Artificial Sequence: Synthetic oligonucleotide
cuggccgcacauguuccca

SEQ ID NO: 6663 - RNA, 19 nt, Artificial Sequence
  Description of Artificial Sequence: Synthetic oligonucleotide
gcuggccgcacauguuccc

SEQ ID NO: 6664 - RNA, 19 nt, Artificial Sequence
  Description of Artificial Sequence: Synthetic oligonucleotide
ugcuggccgcacauguucc

SEQ ID NO: 6665 - RNA, 19 nt, Artificial Sequence
  Description of Artificial Sequence: Synthetic oligonucleotide
cugcuggccgcacauguuc

SEQ ID NO: 6666 - RNA, 19 nt, Artificial Sequence
  Description of Artificial Sequence: Synthetic oligonucleotide
ucugcuggccgcacauguu

SEQ ID NO: 6667 - RNA, 19 nt, Artificial Sequence
  Description of Artificial Sequence: Synthetic oligonucleotide
uucugcuggccgcacaugu

SEQ ID NO: 6668 - RNA, 19 nt, Artificial Sequence
  Description of Artificial Sequence: Synthetic oligonucleotide
cuucugcuggccgcacaug

SEQ ID NO: 6669 - RNA, 19 nt, Artificial Sequence
  Description of Artificial Sequence: Synthetic oligonucleotide
ccuucugcuggccgcacau

SEQ ID NO: 6670 - RNA, 19 nt, Artificial Sequence
  Description of Artificial Sequence: Synthetic oligonucleotide
uccuucugcuggccgcaca

SEQ ID NO: 6671 - RNA, 19 nt, Artificial Sequence
  Description of Artificial Sequence: Synthetic oligonucleotide
cuccuucugcuggccgcac

SEQ ID NO: 6672 - RNA, 19 nt, Artificial Sequence
  Description of Artificial Sequence: Synthetic oligonucleotide
acuccuucugcuggccgca

SEQ ID NO: 6673 - RNA, 19 nt, Artificial Sequence
  Description of Artificial Sequence: Synthetic oligonucleotide
cacuccuucugcuggccgc

SEQ ID NO: 6674 - RNA, 19 nt, Artificial Sequence
  Description of Artificial Sequence: Synthetic oligonucleotide
acacuccuucugcuggccg

SEQ ID NO: 6675 - RNA, 19 nt, Artificial Sequence
  Description of Artificial Sequence: Synthetic oligonucleotide
gacacuccuucugcuggcc

SEQ ID NO: 6676 - RNA, 19 nt, Artificial Sequence
  Description of Artificial Sequence: Synthetic oligonucleotide
ggacacuccuucugcuggc

SEQ ID NO: 6677 - RNA, 19 nt, Artificial Sequence
  Description of Artificial Sequence: Synthetic oligonucleotide
aggacacuccuucugcugg

SEQ ID NO: 6678 - RNA, 19 nt, Artificial Sequence
  Description of Artificial Sequence: Synthetic oligonucleotide
caggacacuccuucugcug

SEQ ID NO: 6679 - RNA, 19 nt, Artificial Sequence
  Description of Artificial Sequence: Synthetic oligonucleotide
ccaggacacuccuucugcu

SEQ ID NO: 6680 - RNA, 19 nt, Artificial Sequence
  Description of Artificial Sequence: Synthetic oligonucleotide
gccaggacacuccuucugc

SEQ ID NO: 6681 - RNA, 19 nt, Artificial Sequence
  Description of Artificial Sequence: Synthetic oligonucleotide
agccaggacacuccuucug

SEQ ID NO: 6682 - RNA, 19 nt, Artificial Sequence
  Description of Artificial Sequence: Synthetic oligonucleotide
gagccaggacacuccuucu

SEQ ID NO: 6683 - RNA, 19 nt, Artificial Sequence
  Description of Artificial Sequence: Synthetic oligonucleotide
ggagccaggacacuccuuc

SEQ ID NO: 6684 - RNA, 19 nt, Artificial Sequence
  Description of Artificial Sequence: Synthetic oligonucleotide
aggagccaggacacuccuu

SEQ ID NO: 6685 - RNA, 19 nt, Artificial Sequence
  Description of Artificial Sequence: Synthetic oligonucleotide
caggagccaggacacuccu

SEQ ID NO: 6686 - RNA, 19 nt, Artificial Sequence
  Description of Artificial Sequence: Synthetic oligonucleotide
ccaggagccaggacacucc

SEQ ID NO: 6687 - RNA, 19 nt, Artificial Sequence
  Description of Artificial Sequence: Synthetic oligonucleotide
gccaggagccaggacacuc

SEQ ID NO: 6688 - RNA, 19 nt, Artificial Sequence
  Description of Artificial Sequence: Synthetic oligonucleotide
ugccaggagccaggacacu

SEQ ID NO: 6689 - RNA, 19 nt, Artificial Sequence
  Description of Artificial Sequence: Synthetic oligonucleotide
uugccaggagccaggacac

SEQ ID NO: 6690 - RNA, 19 nt, Artificial Sequence
  Description of Artificial Sequence: Synthetic oligonucleotide
guugccaggagccaggaca

SEQ ID NO: 6691 - RNA, 19 nt, Artificial Sequence
  Description of Artificial Sequence: Synthetic oligonucleotide
uguugccaggagccaggac

SEQ ID NO: 6692 - RNA, 19 nt, Artificial Sequence
  Description of Artificial Sequence: Synthetic oligonucleotide
cuguugccaggagccagga

SEQ ID NO: 6693 - RNA, 19 nt, Artificial Sequence
  Description of Artificial Sequence: Synthetic oligonucleotide
ccuguugccaggagccagg

SEQ ID NO: 6694 - RNA, 19 nt, Artificial Sequence
  Description of Artificial Sequence: Synthetic oligonucleotide
uccuguugccaggagccag

SEQ ID NO: 6695 - RNA, 19 nt, Artificial Sequence
  Description of Artificial Sequence: Synthetic oligonucleotide
guccuguugccaggagcca

SEQ ID NO: 6696 - RNA, 19 nt, Artificial Sequence
  Description of Artificial Sequence: Synthetic oligonucleotide
gguccuguugccaggagcc

SEQ ID NO: 6697 - RNA, 19 nt, Artificial Sequence
  Description of Artificial Sequence: Synthetic oligonucleotide
ugguccuguugccaggagc

SEQ ID NO: 6698 - RNA, 19 nt, Artificial Sequence
  Description of Artificial Sequence: Synthetic oligonucleotide
gugguccuguugccaggag

SEQ ID NO: 6699 - RNA, 19 nt, Artificial Sequence
  Description of Artificial Sequence: Synthetic oligonucleotide
agugguccuguugccagga

SEQ ID NO: 6700 - RNA, 19 nt, Artificial Sequence
  Description of Artificial Sequence: Synthetic oligonucleotide
cagugguccuguugccagg

SEQ ID NO: 6701 - RNA, 19 nt, Artificial Sequence
  Description of Artificial Sequence: Synthetic oligonucleotide
gcagugguccuguugccag

SEQ ID NO: 6702 - RNA, 19 nt, Artificial Sequence
  Description of Artificial Sequence: Synthetic oligonucleotide
ggcagugguccuguugcca

SEQ ID NO: 6703 - RNA, 19 nt, Artificial Sequence
  Description of Artificial Sequence: Synthetic oligonucleotide
gggcagugguccuguugcc

SEQ ID NO: 6704 - RNA, 19 nt, Artificial Sequence
  Description of Artificial Sequence: Synthetic oligonucleotide
ugggcagugguccuguugc

SEQ ID NO: 6705 - RNA, 19 nt, Artificial Sequence
  Description of Artificial Sequence: Synthetic oligonucleotide
gugggcagugguccuguug

SEQ ID NO: 6706 - RNA, 19 nt, Artificial Sequence
  Description of Artificial Sequence: Synthetic oligonucleotide
ggugggcagugguccuguu

SEQ ID NO: 6707 - RNA, 19 nt, Artificial Sequence
  Description of Artificial Sequence: Synthetic oligonucleotide
aggugggcagugguccugu

SEQ ID NO: 6708 - RNA, 19 nt, Artificial Sequence
  Description of Artificial Sequence: Synthetic oligonucleotide
uaggugggcagugguccug

SEQ ID NO: 6709 - RNA, 19 nt, Artificial Sequence
  Description of Artificial Sequence: Synthetic oligonucleotide
uuaggugggcagugguccu

SEQ ID NO: 6710 - RNA, 19 nt, Artificial Sequence
  Description of Artificial Sequence: Synthetic oligonucleotide
cuuaggugggcaguggucc

SEQ ID NO: 6711 - RNA, 19 nt, Artificial Sequence
  Description of Artificial Sequence: Synthetic oligonucleotide
gcuuaggugggcagugguc

SEQ ID NO: 6712 - RNA, 19 nt, Artificial Sequence
  Description of Artificial Sequence: Synthetic oligonucleotide
agcuuaggugggcaguggu

SEQ ID NO: 6713 - RNA, 19 nt, Artificial Sequence
  Description of Artificial Sequence: Synthetic oligonucleotide
aagcuuaggugggcagugg

SEQ ID NO: 6714 - RNA, 19 nt, Artificial Sequence
  Description of Artificial Sequence: Synthetic oligonucleotide
uaagcuuaggugggcagug

SEQ ID NO: 6715 - RNA, 19 nt, Artificial Sequence
  Description of Artificial Sequence: Synthetic oligonucleotide
guaagcuuaggugggcagu

SEQ ID NO: 6716 - RNA, 19 nt, Artificial Sequence
  Description of Artificial Sequence: Synthetic oligonucleotide
aguaagcuuaggugggcag

SEQ ID NO: 6717 - RNA, 19 nt, Artificial Sequence
  Description of Artificial Sequence: Synthetic oligonucleotide
caguaagcuuaggugggca

SEQ ID NO: 6718 - RNA, 19 nt, Artificial Sequence
  Description of Artificial Sequence: Synthetic oligonucleotide
ucaguaagcuuaggugggc

SEQ ID NO: 6719 - RNA, 19 nt, Artificial Sequence
  Description of Artificial Sequence: Synthetic oligonucleotide
cucaguaagcuuagguggg

SEQ ID NO: 6720 - RNA, 19 nt, Artificial Sequence
  Description of Artificial Sequence: Synthetic oligonucleotide
acucaguaagcuuaggugg

SEQ ID NO: 6721 - RNA, 19 nt, Artificial Sequence
  Description of Artificial Sequence: Synthetic oligonucleotide
aacucaguaagcuuaggug

SEQ ID NO: 6722 - RNA, 19 nt, Artificial Sequence
  Description of Artificial Sequence: Synthetic oligonucleotide
gaacucaguaagcuuaggu

SEQ ID NO: 6723 - RNA, 19 nt, Artificial Sequence
  Description of Artificial Sequence: Synthetic oligonucleotide
ggaacucaguaagcuuagg

SEQ ID NO: 6724 - RNA, 19 nt, Artificial Sequence
  Description of Artificial Sequence: Synthetic oligonucleotide
uggaacucaguaagcuuag

SEQ ID NO: 6725 - RNA, 19 nt, Artificial Sequence
  Description of Artificial Sequence: Synthetic oligonucleotide
guggaacucaguaagcuua

SEQ ID NO: 6726 - RNA, 19 nt, Artificial Sequence
  Description of Artificial Sequence: Synthetic oligonucleotide
gguggaacucaguaagcuu

SEQ ID NO: 6727 - RNA, 19 nt, Artificial Sequence
  Description of Artificial Sequence: Synthetic oligonucleotide
ggguggaacucaguaagcu

SEQ ID NO: 6728 - RNA, 19 nt, Artificial Sequence
  Description of Artificial Sequence: Synthetic oligonucleotide
gggguggaacucaguaagc

SEQ ID NO: 6729 - RNA, 19 nt, Artificial Sequence
  Description of Artificial Sequence: Synthetic oligonucleotide
ggggguggaacucaguaag

SEQ ID NO: 6730 - RNA, 19 nt, Artificial Sequence
  Description of Artificial Sequence: Synthetic oligonucleotide
uggggguggaacucaguaa

SEQ ID NO: 6731 - RNA, 19 nt, Artificial Sequence
  Description of Artificial Sequence: Synthetic oligonucleotide
guggggguggaacucagua

SEQ ID NO: 6732 - RNA, 19 nt, Artificial Sequence
  Description of Artificial Sequence: Synthetic oligonucleotide
uguggggguggaacucagu

SEQ ID NO: 6733 - RNA, 19 nt, Artificial Sequence
  Description of Artificial Sequence: Synthetic oligonucleotide
cuguggggguggaacucag

SEQ ID NO: 6734 - RNA, 19 nt, Artificial Sequence
  Description of Artificial Sequence: Synthetic oligonucleotide
acuguggggguggaacuca

SEQ ID NO: 6735 - RNA, 19 nt, Artificial Sequence
  Description of Artificial Sequence: Synthetic oligonucleotide
cacuguggggguggaacuc

SEQ ID NO: 6736 - RNA, 19 nt, Artificial Sequence
  Description of Artificial Sequence: Synthetic oligonucleotide
ccacuguggggguggaacu

SEQ ID NO: 6737 - RNA, 19 nt, Artificial Sequence
  Description of Artificial Sequence: Synthetic oligonucleotide
uccacuguggggguggaac

SEQ ID NO: 6738 - RNA, 19 nt, Artificial Sequence
  Description of Artificial Sequence: Synthetic oligonucleotide
guccacuguggggguggaa

SEQ ID NO: 6739 - RNA, 19 nt, Artificial Sequence
  Description of Artificial Sequence: Synthetic oligonucleotide
gguccacugugggggugga

SEQ ID NO: 6740 - RNA, 19 nt, Artificial Sequence
  Description of Artificial Sequence: Synthetic oligonucleotide
agguccacugugggggugg

SEQ ID NO: 6741 - RNA, 19 nt, Artificial Sequence
  Description of Artificial Sequence: Synthetic oligonucleotide
gagguccacugugggggug

SEQ ID NO: 6742 - RNA, 19 nt, Artificial Sequence
  Description of Artificial Sequence: Synthetic oligonucleotide
agagguccacugugggggu

SEQ ID NO: 6743 - RNA, 19 nt, Artificial Sequence
  Description of Artificial Sequence: Synthetic oligonucleotide
uagagguccacuguggggg

SEQ ID NO: 6744 - RNA, 19 nt, Artificial Sequence
  Description of Artificial Sequence: Synthetic oligonucleotide
uuagagguccacugugggg

SEQ ID NO: 6745 - RNA, 19 nt, Artificial Sequence
  Description of Artificial Sequence: Synthetic oligonucleotide
cuuagagguccacuguggg

SEQ ID NO: 6746 - RNA, 19 nt, Artificial Sequence
  Description of Artificial Sequence: Synthetic oligonucleotide
ccuuagagguccacugugg

SEQ ID NO: 6747 - RNA, 19 nt, Artificial Sequence
  Description of Artificial Sequence: Synthetic oligonucleotide
cccuuagagguccacugug

SEQ ID NO: 6748 - RNA, 19 nt, Artificial Sequence
  Description of Artificial Sequence: Synthetic oligonucleotide
ccccuuagagguccacugu

SEQ ID NO: 6749 - RNA, 19 nt, Artificial Sequence
  Description of Artificial Sequence: Synthetic oligonucleotide
gccccuuagagguccacug

SEQ ID NO: 6750 - RNA, 19 nt, Artificial Sequence
  Description of Artificial Sequence: Synthetic oligonucleotide
ugccccuuagagguccacu

SEQ ID NO: 6751 - RNA, 19 nt, Artificial Sequence
  Description of Artificial Sequence: Synthetic oligonucleotide
cugccccuuagagguccac

SEQ ID NO: 6752 - RNA, 19 nt, Artificial Sequence
  Description of Artificial Sequence: Synthetic oligonucleotide
acugccccuuagaggucca

SEQ ID NO: 6753 - RNA, 19 nt, Artificial Sequence
  Description of Artificial Sequence: Synthetic oligonucleotide
uacugccccuuagaggucc

SEQ ID NO: 6754 - RNA, 19 nt, Artificial Sequence
  Description of Artificial Sequence: Synthetic oligonucleotide
guacugccccuuagagguc

SEQ ID NO: 6755 - RNA, 19 nt, Artificial Sequence
  Description of Artificial Sequence: Synthetic oligonucleotide
uguacugccccuuagaggu

SEQ ID NO: 6756 - RNA, 19 nt, Artificial Sequence
  Description of Artificial Sequence: Synthetic oligonucleotide
uuguacugccccuuagagg

SEQ ID NO: 6757 - RNA, 19 nt, Artificial Sequence
  Description of Artificial Sequence: Synthetic oligonucleotide
cuuguacugccccuuagag

SEQ ID NO: 6758 - RNA, 19 nt, Artificial Sequence
  Description of Artificial Sequence: Synthetic oligonucleotide
ccuuguacugccccuuaga

SEQ ID NO: 6759 - RNA, 19 nt, Artificial Sequence
  Description of Artificial Sequence: Synthetic oligonucleotide
gccuuguacugccccuuag

SEQ ID NO: 6760 - RNA, 19 nt, Artificial Sequence
  Description of Artificial Sequence: Synthetic oligonucleotide
agccuuguacugccccuua

SEQ ID NO: 6761 - RNA, 19 nt, Artificial Sequence
  Description of Artificial Sequence: Synthetic oligonucleotide
cagccuuguacugccccuu

SEQ ID NO: 6762 - RNA, 19 nt, Artificial Sequence
  Description of Artificial Sequence: Synthetic oligonucleotide
ucagccuuguacugccccu

SEQ ID NO: 6763 - RNA, 19 nt, Artificial Sequence
  Description of Artificial Sequence: Synthetic oligonucleotide
gucagccuuguacugcccc

SEQ ID NO: 6764 - RNA, 19 nt, Artificial Sequence
  Description of Artificial Sequence: Synthetic oligonucleotide
ggucagccuuguacugccc

SEQ ID NO: 6765 - RNA, 19 nt, Artificial Sequence
  Description of Artificial Sequence: Synthetic oligonucleotide
gggucagccuuguacugcc

SEQ ID NO: 6766 - RNA, 19 nt, Artificial Sequence
  Description of Artificial Sequence: Synthetic oligonucleotide
agggucagccuuguacugc

SEQ ID NO: 6767 - RNA, 19 nt, Artificial Sequence
  Description of Artificial Sequence: Synthetic oligonucleotide
cagggucagccuuguacug

SEQ ID NO: 6768 - RNA, 19 nt, Artificial Sequence
  Description of Artificial Sequence: Synthetic oligonucleotide
acagggucagccuuguacu

SEQ ID NO: 6769 - RNA, 19 nt, Artificial Sequence
  Description of Artificial Sequence: Synthetic oligonucleotide
cacagggucagccuuguac

SEQ ID NO: 6770 - RNA, 19 nt, Artificial Sequence
  Description of Artificial Sequence: Synthetic oligonucleotide
acacagggucagccuugua

SEQ ID NO: 6771 - RNA, 19 nt, Artificial Sequence
  Description of Artificial Sequence: Synthetic oligonucleotide
cacacagggucagccuugu

SEQ ID NO: 6772 - RNA, 19 nt, Artificial Sequence
  Description of Artificial Sequence: Synthetic oligonucleotide
ccacacagggucagccuug

SEQ ID NO: 6773 - RNA, 19 nt, Artificial Sequence
  Description of Artificial Sequence: Synthetic oligonucleotide
gccacacagggucagccuu

SEQ ID NO: 6774 - RNA, 19 nt, Artificial Sequence
  Description of Artificial Sequence: Synthetic oligonucleotide
agccacacagggucagccu

SEQ ID NO: 6775 - RNA, 19 nt, Artificial Sequence
  Description of Artificial Sequence: Synthetic oligonucleotide
gagccacacagggucagcc

SEQ ID NO: 6776 - RNA, 19 nt, Artificial Sequence
  Description of Artificial Sequence: Synthetic oligonucleotide
ggagccacacagggucagc

SEQ ID NO: 6777 - RNA, 19 nt, Artificial Sequence
  Description of Artificial Sequence: Synthetic oligonucleotide
uggagccacacagggucag

SEQ ID NO: 6778 - RNA, 19 nt, Artificial Sequence
  Description of Artificial Sequence: Synthetic oligonucleotide
uuggagccacacaggguca

SEQ ID NO: 6779 - RNA, 19 nt, Artificial Sequence
  Description of Artificial Sequence: Synthetic oligonucleotide
guuggagccacacaggguc

SEQ ID NO: 6780 - RNA, 19 nt, Artificial Sequence
  Description of Artificial Sequence: Synthetic oligonucleotide
aguuggagccacacagggu

SEQ ID NO: 6781 - RNA, 19 nt, Artificial Sequence
  Description of Artificial Sequence: Synthetic oligonucleotide
aaguuggagccacacaggg

SEQ ID NO: 6782 - RNA, 19 nt, Artificial Sequence
  Description of Artificial Sequence: Synthetic oligonucleotide
gaaguuggagccacacagg

SEQ ID NO: 6783 - RNA, 19 nt, Artificial Sequence
  Description of Artificial Sequence: Synthetic oligonucleotide
agaaguuggagccacacag

SEQ ID NO: 6784 - RNA, 19 nt, Artificial Sequence
  Description of Artificial Sequence: Synthetic oligonucleotide
uagaaguuggagccacaca

SEQ ID NO: 6785 - RNA, 19 nt, Artificial Sequence
  Description of Artificial Sequence: Synthetic oligonucleotide
guagaaguuggagccacac

SEQ ID NO: 6786 - RNA, 19 nt, Artificial Sequence
  Description of Artificial Sequence: Synthetic oligonucleotide
gguagaaguuggagccaca

SEQ ID NO: 6787 - RNA, 19 nt, Artificial Sequence
  Description of Artificial Sequence: Synthetic oligonucleotide
agguagaaguuggagccac

SEQ ID NO: 6788 - RNA, 19 nt, Artificial Sequence
  Description of Artificial Sequence: Synthetic oligonucleotide
aagguagaaguuggagcca

SEQ ID NO: 6789 - RNA, 19 nt, Artificial Sequence
  Description of Artificial Sequence: Synthetic oligonucleotide
gaagguagaaguuggagcc

SEQ ID NO: 6790 - RNA, 19 nt, Artificial Sequence
  Description of Artificial Sequence: Synthetic oligonucleotide
ugaagguagaaguuggagc

SEQ ID NO: 6791 - RNA, 19 nt, Artificial Sequence
  Description of Artificial Sequence: Synthetic oligonucleotide
gugaagguagaaguuggag

SEQ ID NO: 6792 - RNA, 19 nt, Artificial Sequence
  Description of Artificial Sequence: Synthetic oligonucleotide
ggugaagguagaaguugga

SEQ ID NO: 6793 - RNA, 19 nt, Artificial Sequence
  Description of Artificial Sequence: Synthetic oligonucleotide
gggugaagguagaaguugg

SEQ ID NO: 6794 - RNA, 19 nt, Artificial Sequence
  Description of Artificial Sequence: Synthetic oligonucleotide
agggugaagguagaaguug

SEQ ID NO: 6795 - RNA, 19 nt, Artificial Sequence
  Description of Artificial Sequence: Synthetic oligonucleotide
aagggugaagguagaaguu

SEQ ID NO: 6796 - RNA, 19 nt, Artificial Sequence
  Description of Artificial Sequence: Synthetic oligonucleotide
gaagggugaagguagaagu

SEQ ID NO: 6797 - RNA, 19 nt, Artificial Sequence
  Description of Artificial Sequence: Synthetic oligonucleotide
agaagggugaagguagaag

SEQ ID NO: 6798 - RNA, 19 nt, Artificial Sequence
  Description of Artificial Sequence: Synthetic oligonucleotide
cagaagggugaagguagaa

SEQ ID NO: 6799 - RNA, 19 nt, Artificial Sequence
  Description of Artificial Sequence: Synthetic oligonucleotide
ccagaagggugaagguaga

SEQ ID NO: 6800 - RNA, 19 nt, Artificial Sequence
  Description of Artificial Sequence: Synthetic oligonucleotide
accagaagggugaagguag

SEQ ID NO: 6801 - RNA, 19 nt, Artificial Sequence
  Description of Artificial Sequence: Synthetic oligonucleotide
gaccagaagggugaaggua

SEQ ID NO: 6802 - RNA, 19 nt, Artificial Sequence
  Description of Artificial Sequence: Synthetic oligonucleotide
agaccagaagggugaaggu

SEQ ID NO: 6803 - RNA, 19 nt, Artificial Sequence
  Description of Artificial Sequence: Synthetic oligonucleotide
cagaccagaagggugaagg

SEQ ID NO: 6804 - RNA, 19 nt, Artificial Sequence
  Description of Artificial Sequence: Synthetic oligonucleotide
ccagaccagaagggugaag

SEQ ID NO: 6805 - RNA, 19 nt, Artificial Sequence
  Description of Artificial Sequence: Synthetic oligonucleotide
accagaccagaagggugaa

SEQ ID NO: 6806 - RNA, 19 nt, Artificial Sequence
  Description of Artificial Sequence: Synthetic oligonucleotide
caccagaccagaaggguga

SEQ ID NO: 6807 - RNA, 19 nt, Artificial Sequence
  Description of Artificial Sequence: Synthetic oligonucleotide
gcaccagaccagaagggug

SEQ ID NO: 6808 - RNA, 19 nt, Artificial Sequence
  Description of Artificial Sequence: Synthetic oligonucleotide
ggcaccagaccagaagggu

SEQ ID NO: 6809 - RNA, 19 nt, Artificial Sequence
  Description of Artificial Sequence: Synthetic oligonucleotide
aggcaccagaccagaaggg

SEQ ID NO: 6810 - RNA, 19 nt, Artificial Sequence
  Description of Artificial Sequence: Synthetic oligonucleotide
caggcaccagaccagaagg

SEQ ID NO: 6811 - RNA, 19 nt, Artificial Sequence
  Description of Artificial Sequence: Synthetic oligonucleotide
ucaggcaccagaccagaag

SEQ ID NO: 6812 - RNA, 19 nt, Artificial Sequence
  Description of Artificial Sequence: Synthetic oligonucleotide
cucaggcaccagaccagaa

SEQ ID NO: 6813 - RNA, 19 nt, Artificial Sequence
  Description of Artificial Sequence: Synthetic oligonucleotide
ccucaggcaccagaccaga

SEQ ID NO: 6814 - RNA, 19 nt, Artificial Sequence
  Description of Artificial Sequence: Synthetic oligonucleotide
cccucaggcaccagaccag

SEQ ID NO: 6815 - RNA, 19 nt, Artificial Sequence
  Description of Artificial Sequence: Synthetic oligonucleotide
ucccucaggcaccagacca

SEQ ID NO: 6816 - RNA, 19 nt, Artificial Sequence
  Description of Artificial Sequence: Synthetic oligonucleotide
uucccucaggcaccagacc

SEQ ID NO: 6817 - RNA, 19 nt, Artificial Sequence
  Description of Artificial Sequence: Synthetic oligonucleotide
guucccucaggcaccagac

SEQ ID NO: 6818 - RNA, 19 nt, Artificial Sequence
  Description of Artificial Sequence: Synthetic oligonucleotide
gguucccucaggcaccaga

SEQ ID NO: 6819 - RNA, 19 nt, Artificial Sequence
  Description of Artificial Sequence: Synthetic oligonucleotide
ggguucccucaggcaccag

SEQ ID NO: 6820 - RNA, 19 nt, Artificial Sequence
  Description of Artificial Sequence: Synthetic oligonucleotide
uggguucccucaggcacca

SEQ ID NO: 6821 - RNA, 19 nt, Artificial Sequence
  Description of Artificial Sequence: Synthetic oligonucleotide
auggguucccucaggcacc

SEQ ID NO: 6822 - RNA, 19 nt, Artificial Sequence
  Description of Artificial Sequence: Synthetic oligonucleotide
gauggguucccucaggcac

SEQ ID NO: 6823 - RNA, 19 nt, Artificial Sequence
  Description of Artificial Sequence: Synthetic oligonucleotide
ugauggguucccucaggca

SEQ ID NO: 6824 - RNA, 19 nt, Artificial Sequence
  Description of Artificial Sequence: Synthetic oligonucleotide
cugauggguucccucaggc

SEQ ID NO: 6825 - RNA, 19 nt, Artificial Sequence
  Description of Artificial Sequence: Synthetic oligonucleotide
ccugauggguucccucagg

SEQ ID NO: 6826 - RNA, 19 nt, Artificial Sequence
  Description of Artificial Sequence: Synthetic oligonucleotide
accugauggguucccucag

SEQ ID NO: 6827 - RNA, 19 nt, Artificial Sequence
  Description of Artificial Sequence: Synthetic oligonucleotide
gaccugauggguucccuca

SEQ ID NO: 6828 - RNA, 19 nt, Artificial Sequence
  Description of Artificial Sequence: Synthetic oligonucleotide
ugaccugauggguucccuc

SEQ ID NO: 6829 - RNA, 19 nt, Artificial Sequence
  Description of Artificial Sequence: Synthetic oligonucleotide
gugaccugauggguucccu

SEQ ID NO: 6830 - RNA, 19 nt, Artificial Sequence
  Description of Artificial Sequence: Synthetic oligonucleotide
agugaccugauggguuccc

SEQ ID NO: 6831 - RNA, 19 nt, Artificial Sequence
  Description of Artificial Sequence: Synthetic oligonucleotide
cagugaccugauggguucc

SEQ ID NO: 6832 - RNA, 19 nt, Artificial Sequence
  Description of Artificial Sequence: Synthetic oligonucleotide
acagugaccugauggguuc

SEQ ID NO: 6833 - RNA, 19 nt, Artificial Sequence
  Description of Artificial Sequence: Synthetic oligonucleotide
cacagugaccugauggguu

SEQ ID NO: 6834 - RNA, 19 nt, Artificial Sequence
  Description of Artificial Sequence: Synthetic oligonucleotide
ccacagugaccugaugggu

SEQ ID NO: 6835 - RNA, 19 nt, Artificial Sequence
  Description of Artificial Sequence: Synthetic oligonucleotide
cccacagugaccugauggg

SEQ ID NO: 6836 - RNA, 19 nt, Artificial Sequence
  Description of Artificial Sequence: Synthetic oligonucleotide
gcccacagugaccugaugg

SEQ ID NO: 6837 - RNA, 19 nt, Artificial Sequence
  Description of Artificial Sequence: Synthetic oligonucleotide
ggcccacagugaccugaug

SEQ ID NO: 6838 - RNA, 19 nt, Artificial Sequence
  Description of Artificial Sequence: Synthetic oligonucleotide
uggcccacagugaccugau

SEQ ID NO: 6839 - RNA, 19 nt, Artificial Sequence
  Description of Artificial Sequence: Synthetic oligonucleotide
uuggcccacagugaccuga

SEQ ID NO: 6840 - RNA, 19 nt, Artificial Sequence
  Description of Artificial Sequence: Synthetic oligonucleotide
uuuggcccacagugaccug

SEQ ID NO: 6841 - RNA, 19 nt, Artificial Sequence
  Description of Artificial Sequence: Synthetic oligonucleotide
cuuuggcccacagugaccu

SEQ ID NO: 6842 - RNA, 19 nt, Artificial Sequence
  Description of Artificial Sequence: Synthetic oligonucleotide
acuuuggcccacagugacc

SEQ ID NO: 6843 - RNA, 19 nt, Artificial Sequence
  Description of Artificial Sequence: Synthetic oligonucleotide
gacuuuggcccacagugac

SEQ ID NO: 6844 - RNA, 19 nt, Artificial Sequence
  Description of Artificial Sequence: Synthetic oligonucleotide
ggacuuuggcccacaguga

SEQ ID NO: 6845 - RNA, 19 nt, Artificial Sequence
  Description of Artificial Sequence: Synthetic oligonucleotide
gggacuuuggcccacagug

SEQ ID NO: 6846 - RNA, 19 nt, Artificial Sequence
  Description of Artificial Sequence: Synthetic oligonucleotide
agggacuuuggcccacagu

SEQ ID NO: 6847 - RNA, 19 nt, Artificial Sequence
  Description of Artificial Sequence: Synthetic oligonucleotide
cagggacuuuggcccacag

SEQ ID NO: 6848 - RNA, 19 nt, Artificial Sequence
  Description of Artificial Sequence: Synthetic oligonucleotide
gcagggacuuuggcccaca

SEQ ID NO: 6849 - RNA, 19 nt, Artificial Sequence
  Description of Artificial Sequence: Synthetic oligonucleotide
ggcagggacuuuggcccac

SEQ ID NO: 6850 - RNA, 19 nt, Artificial Sequence
  Description of Artificial Sequence: Synthetic oligonucleotide
cggcagggacuuuggccca

SEQ ID NO: 6851 - RNA, 19 nt, Artificial Sequence
  Description of Artificial Sequence: Synthetic oligonucleotide
ccggcagggacuuuggccc

SEQ ID NO: 6852 - RNA, 19 nt, Artificial Sequence
  Description of Artificial Sequence: Synthetic oligonucleotide
gccggcagggacuuuggcc

SEQ ID NO: 6853 - RNA, 19 nt, Artificial Sequence
  Description of Artificial Sequence: Synthetic oligonucleotide
ggccggcagggacuuuggc

SEQ ID NO: 6854 - RNA, 19 nt, Artificial Sequence
  Description of Artificial Sequence: Synthetic oligonucleotide
uggccggcagggacuuugg

SEQ ID NO: 6855 - RNA, 19 nt, Artificial Sequence
  Description of Artificial Sequence: Synthetic oligonucleotide
guggccggcagggacuuug

SEQ ID NO: 6856 - RNA, 19 nt, Artificial Sequence
  Description of Artificial Sequence: Synthetic oligonucleotide
aguggccggcagggacuuu

SEQ ID NO: 6857 - RNA, 19 nt, Artificial Sequence
  Description of Artificial Sequence: Synthetic oligonucleotide
caguggccggcagggacuu

SEQ ID NO: 6858 - RNA, 19 nt, Artificial Sequence
  Description of Artificial Sequence: Synthetic oligonucleotide
gcaguggccggcagggacu

SEQ ID NO: 6859 - RNA, 19 nt, Artificial Sequence
  Description of Artificial Sequence: Synthetic oligonucleotide
ggcaguggccggcagggac

SEQ ID NO: 6860 - RNA, 19 nt, Artificial Sequence
  Description of Artificial Sequence: Synthetic oligonucleotide
gggcaguggccggcaggga

SEQ ID NO: 6861 - RNA, 19 nt, Artificial Sequence
  Description of Artificial Sequence: Synthetic oligonucleotide
ugggcaguggccggcaggg

SEQ ID NO: 6862 - RNA, 19 nt, Artificial Sequence
  Description of Artificial Sequence: Synthetic oligonucleotide
uugggcaguggccggcagg

SEQ ID NO: 6863 - RNA, 19 nt, Artificial Sequence
  Description of Artificial Sequence: Synthetic oligonucleotide
cuugggcaguggccggcag

SEQ ID NO: 6864 - RNA, 19 nt, Artificial Sequence
  Description of Artificial Sequence: Synthetic oligonucleotide
ccuugggcaguggccggca

SEQ ID NO: 6865 - RNA, 19 nt, Artificial Sequence
  Description of Artificial Sequence: Synthetic oligonucleotide
uccuugggcaguggccggc

SEQ ID NO: 6866 - RNA, 19 nt, Artificial Sequence
  Description of Artificial Sequence: Synthetic oligonucleotide
guccuugggcaguggccgg

SEQ ID NO: 6867 - RNA, 19 nt, Artificial Sequence
  Description of Artificial Sequence: Synthetic oligonucleotide
uguccuugggcaguggccg

SEQ ID NO: 6868 - RNA, 19 nt, Artificial Sequence
  Description of Artificial Sequence: Synthetic oligonucleotide
cuguccuugggcaguggcc

SEQ ID NO: 6869 - RNA, 19 nt, Artificial Sequence
  Description of Artificial Sequence: Synthetic oligonucleotide
gcuguccuugggcaguggc

SEQ ID NO: 6870 - RNA, 19 nt, Artificial Sequence
  Description of Artificial Sequence: Synthetic oligonucleotide
agcuguccuugggcagugg

SEQ ID NO: 6871 - RNA, 19 nt, Artificial Sequence
  Description of Artificial Sequence: Synthetic oligonucleotide
gagcuguccuugggcagug

SEQ ID NO: 6872 - RNA, 19 nt, Artificial Sequence
  Description of Artificial Sequence: Synthetic oligonucleotide
ugagcuguccuugggcagu

SEQ ID NO: 6873 - RNA, 19 nt, Artificial Sequence
  Description of Artificial Sequence: Synthetic oligonucleotide
uugagcuguccuugggcag

SEQ ID NO: 6874 - RNA, 19 nt, Artificial Sequence
  Description of Artificial Sequence: Synthetic oligonucleotide
uuugagcuguccuugggca

SEQ ID NO: 6875 - RNA, 19 nt, Artificial Sequence
  Description of Artificial Sequence: Synthetic oligonucleotide
uuuugagcuguccuugggc

SEQ ID NO: 6876 - RNA, 19 nt, Artificial Sequence
  Description of Artificial Sequence: Synthetic oligonucleotide
guuuugagcuguccuuggg

SEQ ID NO: 6877 - RNA, 19 nt, Artificial Sequence
  Description of Artificial Sequence: Synthetic oligonucleotide
aguuuugagcuguccuugg

SEQ ID NO: 6878 - RNA, 19 nt, Artificial Sequence
  Description of Artificial Sequence: Synthetic oligonucleotide
gaguuuugagcuguccuug

SEQ ID NO: 6879 - RNA, 19 nt, Artificial Sequence
  Description of Artificial Sequence: Synthetic oligonucleotide
ugaguuuugagcuguccuu

SEQ ID NO: 6880 - RNA, 19 nt, Artificial Sequence
  Description of Artificial Sequence: Synthetic oligonucleotide
cugaguuuugagcuguccu

SEQ ID NO: 6881 - RNA, 19 nt, Artificial Sequence
  Description of Artificial Sequence: Synthetic oligonucleotide
ucugaguuuugagcugucc

SEQ ID NO: 6882 - RNA, 19 nt, Artificial Sequence
  Description of Artificial Sequence: Synthetic oligonucleotide
gucugaguuuugagcuguc

SEQ ID NO: 6883 - RNA, 19 nt, Artificial Sequence
  Description of Artificial Sequence: Synthetic oligonucleotide
ggucugaguuuugagcugu

SEQ ID NO: 6884 - RNA, 19 nt, Artificial Sequence
  Description of Artificial Sequence: Synthetic oligonucleotide
uggucugaguuuugagcug

SEQ ID NO: 6885 - RNA, 19 nt, Artificial Sequence
  Description of Artificial Sequence: Synthetic oligonucleotide
cuggucugaguuuugagcu

SEQ ID NO: 6886 - RNA, 19 nt, Artificial Sequence
  Description of Artificial Sequence: Synthetic oligonucleotide
acuggucugaguuuugagc

SEQ ID NO: 6887 - RNA, 19 nt, Artificial Sequence
  Description of Artificial Sequence: Synthetic oligonucleotide
cacuggucugaguuuugag

SEQ ID NO: 6888 - RNA, 19 nt, Artificial Sequence
  Description of Artificial Sequence: Synthetic oligonucleotide
gcacuggucugaguuuuga

SEQ ID NO: 6889 - RNA, 19 nt, Artificial Sequence
  Description of Artificial Sequence: Synthetic oligonucleotide
ggcacuggucugaguuuug

SEQ ID NO: 6890 - RNA, 19 nt, Artificial Sequence
  Description of Artificial Sequence: Synthetic oligonucleotide
gggcacuggucugaguuuu

SEQ ID NO: 6891 - RNA, 19 nt, Artificial Sequence
  Description of Artificial Sequence: Synthetic oligonucleotide
ggggcacuggucugaguuu

SEQ ID NO: 6892 - RNA, 19 nt, Artificial Sequence
  Description of Artificial Sequence: Synthetic oligonucleotide
cggggcacuggucugaguu

SEQ ID NO: 6893 - RNA, 19 nt, Artificial Sequence
  Description of Artificial Sequence: Synthetic oligonucleotide
ccggggcacuggucugagu

SEQ ID NO: 6894 - RNA, 19 nt, Artificial Sequence
  Description of Artificial Sequence: Synthetic oligonucleotide
uccggggcacuggucugag

SEQ ID NO: 6895 - RNA, 19 nt, Artificial Sequence
  Description of Artificial Sequence: Synthetic oligonucleotide
uuccggggcacuggucuga

SEQ ID NO: 6896 - RNA, 19 nt, Artificial Sequence
  Description of Artificial Sequence: Synthetic oligonucleotide
uuuccggggcacuggucug

SEQ ID NO: 6897 - RNA, 19 nt, Artificial Sequence
  Description of Artificial Sequence: Synthetic oligonucleotide
cuuuccggggcacuggucu

SEQ ID NO: 6898 - RNA, 19 nt, Artificial Sequence
  Description of Artificial Sequence: Synthetic oligonucleotide
ucuuuccggggcacugguc

SEQ ID NO: 6899 - RNA, 19 nt, Artificial Sequence
  Description of Artificial Sequence: Synthetic oligonucleotide
gucuuuccggggcacuggu

SEQ ID NO: 6900 - RNA, 19 nt, Artificial Sequence
  Description of Artificial Sequence: Synthetic oligonucleotide
agucuuuccggggcacugg

SEQ ID NO: 6901 - RNA, 19 nt, Artificial Sequence
  Description of Artificial Sequence: Synthetic oligonucleotide
aagucuuuccggggcacug

SEQ ID NO: 6902 - RNA, 19 nt, Artificial Sequence
  Description of Artificial Sequence: Synthetic oligonucleotide
aaagucuuuccggggcacu

SEQ ID NO: 6903 - RNA, 19 nt, Artificial Sequence
  Description of Artificial Sequence: Synthetic oligonucleotide
caaagucuuuccggggcac

SEQ ID NO: 6904 - RNA, 19 nt, Artificial Sequence
  Description of Artificial Sequence: Synthetic oligonucleotide
acaaagucuuuccggggca

SEQ ID NO: 6905 - RNA, 19 nt, Artificial Sequence
  Description of Artificial Sequence: Synthetic oligonucleotide
uacaaagucuuuccggggc

SEQ ID NO: 6906 - RNA, 19 nt, Artificial Sequence
  Description of Artificial Sequence: Synthetic oligonucleotide
cuacaaagucuuuccgggg

SEQ ID NO: 6907 - RNA, 19 nt, Artificial Sequence
  Description of Artificial Sequence: Synthetic oligonucleotide
ucuacaaagucuuuccggg

SEQ ID NO: 6908 - RNA, 19 nt, Artificial Sequence
  Description of Artificial Sequence: Synthetic oligonucleotide
cucuacaaagucuuuccgg

SEQ ID NO: 6909 - RNA, 19 nt, Artificial Sequence
  Description of Artificial Sequence: Synthetic oligonucleotide
ccucuacaaagucuuuccg

SEQ ID NO: 6910 - RNA, 19 nt, Artificial Sequence
  Description of Artificial Sequence: Synthetic oligonucleotide
uccucuacaaagucuuucc

SEQ ID NO: 6911 - RNA, 19 nt, Artificial Sequence
  Description of Artificial Sequence: Synthetic oligonucleotide
cuccucuacaaagucuuuc

SEQ ID NO: 6912 - RNA, 19 nt, Artificial Sequence
  Description of Artificial Sequence: Synthetic oligonucleotide
acuccucuacaaagucuuu

SEQ ID NO: 6913 - RNA, 19 nt, Artificial Sequence
  Description of Artificial Sequence: Synthetic oligonucleotide
aacuccucuacaaagucuu

SEQ ID NO: 6914 - RNA, 19 nt, Artificial Sequence
  Description of Artificial Sequence: Synthetic oligonucleotide
aaacuccucuacaaagucu

SEQ ID NO: 6915 - RNA, 19 nt, Artificial Sequence
  Description of Artificial Sequence: Synthetic oligonucleotide
caaacuccucuacaaaguc

SEQ ID NO: 6916 - RNA, 19 nt, Artificial Sequence
  Description of Artificial Sequence: Synthetic oligonucleotide
ucaaacuccucuacaaagu

SEQ ID NO: 6917 - RNA, 19 nt, Artificial Sequence
  Description of Artificial Sequence: Synthetic oligonucleotide
cucaaacuccucuacaaag

SEQ ID NO: 6918 - RNA, 19 nt, Artificial Sequence
  Description of Artificial Sequence: Synthetic oligonucleotide
acucaaacuccucuacaaa

SEQ ID NO: 6919 - RNA, 19 nt, Artificial Sequence
  Description of Artificial Sequence: Synthetic oligonucleotide
cacucaaacuccucuacaa

SEQ ID NO: 6920 - RNA, 19 nt, Artificial Sequence
  Description of Artificial Sequence: Synthetic oligonucleotide
acacucaaacuccucuaca

SEQ ID NO: 6921 - RNA, 19 nt, Artificial Sequence
  Description of Artificial Sequence: Synthetic oligonucleotide
cacacucaaacuccucuac

SEQ ID NO: 6922 - RNA, 19 nt, Artificial Sequence
  Description of Artificial Sequence: Synthetic oligonucleotide
ucacacucaaacuccucua

SEQ ID NO: 6923 - RNA, 19 nt, Artificial Sequence
  Description of Artificial Sequence: Synthetic oligonucleotide
uucacacucaaacuccucu

SEQ ID NO: 6924 - RNA, 19 nt, Artificial Sequence
  Description of Artificial Sequence: Synthetic oligonucleotide
guucacacucaaacuccuc

SEQ ID NO: 6925 - RNA, 19 nt, Artificial Sequence
  Description of Artificial Sequence: Synthetic oligonucleotide
aguucacacucaaacuccu

SEQ ID NO: 6926 - RNA, 19 nt, Artificial Sequence
  Description of Artificial Sequence: Synthetic oligonucleotide
caguucacacucaaacucc

SEQ ID NO: 6927 - RNA, 19 nt, Artificial Sequence
  Description of Artificial Sequence: Synthetic oligonucleotide
ccaguucacacucaaacuc

SEQ ID NO: 6928 - RNA, 19 nt, Artificial Sequence
  Description of Artificial Sequence: Synthetic oligonucleotide
uccaguucacacucaaacu

SEQ ID NO: 6929 - RNA, 19 nt, Artificial Sequence
  Description of Artificial Sequence: Synthetic oligonucleotide
cuccaguucacacucaaac

SEQ ID NO: 6930 - RNA, 19 nt, Artificial Sequence
  Description of Artificial Sequence: Synthetic oligonucleotide
gcuccaguucacacucaaa

SEQ ID NO: 6931 - RNA, 19 nt, Artificial Sequence
  Description of Artificial Sequence: Synthetic oligonucleotide
ggcuccaguucacacucaa

SEQ ID NO: 6932 - RNA, 19 nt, Artificial Sequence
  Description of Artificial Sequence: Synthetic oligonucleotide
gggcuccaguucacacuca

SEQ ID NO: 6933 - RNA, 19 nt, Artificial Sequence
  Description of Artificial Sequence: Synthetic oligonucleotide
agggcuccaguucacacuc

SEQ ID NO: 6934 - RNA, 19 nt, Artificial Sequence
  Description of Artificial Sequence: Synthetic oligonucleotide
aagggcuccaguucacacu

SEQ ID NO: 6935 - RNA, 19 nt, Artificial Sequence
  Description of Artificial Sequence: Synthetic oligonucleotide
caagggcuccaguucacac

SEQ ID NO: 6936 - RNA, 19 nt, Artificial Sequence
  Description of Artificial Sequence: Synthetic oligonucleotide
ccaagggcuccaguucaca

SEQ ID NO: 6937 - RNA, 19 nt, Artificial Sequence
  Description of Artificial Sequence: Synthetic oligonucleotide
cccaagggcuccaguucac

SEQ ID NO: 6938 - RNA, 19 nt, Artificial Sequence
  Description of Artificial Sequence: Synthetic oligonucleotide
gcccaagggcuccaguuca

SEQ ID NO: 6939 - RNA, 19 nt, Artificial Sequence
  Description of Artificial Sequence: Synthetic oligonucleotide
ugcccaagggcuccaguuc

SEQ ID NO: 6940 - RNA, 19 nt, Artificial Sequence
  Description of Artificial Sequence: Synthetic oligonucleotide
gugcccaagggcuccaguu

SEQ ID NO: 6941 - RNA, 19 nt, Artificial Sequence
  Description of Artificial Sequence: Synthetic oligonucleotide
ggugcccaagggcuccagu

SEQ ID NO: 6942 - RNA, 19 nt, Artificial Sequence
  Description of Artificial Sequence: Synthetic oligonucleotide
gggugcccaagggcuccag

SEQ ID NO: 6943 - RNA, 19 nt, Artificial Sequence
  Description of Artificial Sequence: Synthetic oligonucleotide
ugggugcccaagggcucca

SEQ ID NO: 6944 - RNA, 19 nt, Artificial Sequence
  Description of Artificial Sequence: Synthetic oligonucleotide
cugggugcccaagggcucc

SEQ ID NO: 6945 - RNA, 19 nt, Artificial Sequence
  Description of Artificial Sequence: Synthetic oligonucleotide
ccugggugcccaagggcuc

SEQ ID NO: 6946 - RNA, 19 nt, Artificial Sequence
  Description of Artificial Sequence: Synthetic oligonucleotide
gccugggugcccaagggcu

SEQ ID NO: 6947 - RNA, 19 nt, Artificial Sequence
  Description of Artificial Sequence: Synthetic oligonucleotide
ugccugggugcccaagggc

SEQ ID NO: 6948 - RNA, 19 nt, Artificial Sequence
  Description of Artificial Sequence: Synthetic oligonucleotide
cugccugggugcccaaggg

SEQ ID NO: 6949 - RNA, 19 nt, Artificial Sequence
  Description of Artificial Sequence: Synthetic oligonucleotide
acugccugggugcccaagg

SEQ ID NO: 6950 - RNA, 19 nt, Artificial Sequence
  Description of Artificial Sequence: Synthetic oligonucleotide
cacugccugggugcccaag

SEQ ID NO: 6951 - RNA, 19 nt, Artificial Sequence
  Description of Artificial Sequence: Synthetic oligonucleotide
ccacugccugggugcccaa

SEQ ID NO: 6952 - RNA, 19 nt, Artificial Sequence
  Description of Artificial Sequence: Synthetic oligonucleotide
cccacugccugggugccca

SEQ ID NO: 6953 - RNA, 19 nt, Artificial Sequence
  Description of Artificial Sequence: Synthetic oligonucleotide
ccccacugccugggugccc

SEQ ID NO: 6954 - RNA, 19 nt, Artificial Sequence
  Description of Artificial Sequence: Synthetic oligonucleotide
gccccacugccugggugcc

SEQ ID NO: 6955 - RNA, 19 nt, Artificial Sequence
  Description of Artificial Sequence: Synthetic oligonucleotide
ggccccacugccugggugc

SEQ ID NO: 6956 - RNA, 19 nt, Artificial Sequence
  Description of Artificial Sequence: Synthetic oligonucleotide
aggccccacugccugggug

SEQ ID NO: 6957 - RNA, 19 nt, Artificial Sequence
  Description of Artificial Sequence: Synthetic oligonucleotide
uaggccccacugccugggu

SEQ ID NO: 6958 - RNA, 19 nt, Artificial Sequence
  Description of Artificial Sequence: Synthetic oligonucleotide
guaggccccacugccuggg

SEQ ID NO: 6959 - RNA, 19 nt, Artificial Sequence
  Description of Artificial Sequence: Synthetic oligonucleotide
gguaggccccacugccugg

SEQ ID NO: 6960 - RNA, 19 nt, Artificial Sequence
  Description of Artificial Sequence: Synthetic oligonucleotide
ugguaggccccacugccug

SEQ ID NO: 6961 - RNA, 19 nt, Artificial Sequence
  Description of Artificial Sequence: Synthetic oligonucleotide
uugguaggccccacugccu

SEQ ID NO: 6962 - RNA, 19 nt, Artificial Sequence
  Description of Artificial Sequence: Synthetic oligonucleotide
guugguaggccccacugcc

SEQ ID NO: 6963 - RNA, 19 nt, Artificial Sequence
  Description of Artificial Sequence: Synthetic oligonucleotide
cguugguaggccccacugc

SEQ ID NO: 6964 - RNA, 19 nt, Artificial Sequence
  Description of Artificial Sequence: Synthetic oligonucleotide
acguugguaggccccacug

SEQ ID NO: 6965 - RNA, 19 nt, Artificial Sequence
  Description of Artificial Sequence: Synthetic oligonucleotide
gacguugguaggccccacu

SEQ ID NO: 6966 - RNA, 19 nt, Artificial Sequence
  Description of Artificial Sequence: Synthetic oligonucleotide
ugacguugguaggccccac

SEQ ID NO: 6967 - RNA, 19 nt, Artificial Sequence
  Description of Artificial Sequence: Synthetic oligonucleotide
cugacguugguaggcccca

SEQ ID NO: 6968 - RNA, 19 nt, Artificial Sequence
  Description of Artificial Sequence: Synthetic oligonucleotide
gcugacguugguaggcccc

SEQ ID NO: 6969 - RNA, 19 nt, Artificial Sequence
  Description of Artificial Sequence: Synthetic oligonucleotide
ggcugacguugguaggccc

SEQ ID NO: 6970 - RNA, 19 nt, Artificial Sequence
  Description of Artificial Sequence: Synthetic oligonucleotide
aggcugacguugguaggcc

SEQ ID NO: 6971 - RNA, 19 nt, Artificial Sequence
  Description of Artificial Sequence: Synthetic oligonucleotide
gaggcugacguugguaggc

SEQ ID NO: 6972 - RNA, 19 nt, Artificial Sequence
  Description of Artificial Sequence: Synthetic oligonucleotide
ugaggcugacguugguagg

SEQ ID NO: 6973 - RNA, 19 nt, Artificial Sequence
  Description of Artificial Sequence: Synthetic oligonucleotide
gugaggcugacguugguag

SEQ ID NO: 6974 - RNA, 19 nt, Artificial Sequence
  Description of Artificial Sequence: Synthetic oligonucleotide
ggugaggcugacguuggua

SEQ ID NO: 6975 - RNA, 19 nt, Artificial Sequence
  Description of Artificial Sequence: Synthetic oligonucleotide
cggugaggcugacguuggu

SEQ ID NO: 6976 - RNA, 19 nt, Artificial Sequence
  Description of Artificial Sequence: Synthetic oligonucleotide
acggugaggcugacguugg

SEQ ID NO: 6977 - RNA, 19 nt, Artificial Sequence
  Description of Artificial Sequence: Synthetic oligonucleotide
cacggugaggcugacguug

SEQ ID NO: 6978 - RNA, 19 nt, Artificial Sequence
  Description of Artificial Sequence: Synthetic oligonucleotide
ucacggugaggcugacguu

SEQ ID NO: 6979 - RNA, 19 nt, Artificial Sequence
  Description of Artificial Sequence: Synthetic oligonucleotide
gucacggugaggcugacgu

SEQ ID NO: 6980 - RNA, 19 nt, Artificial Sequence
  Description of Artificial Sequence: Synthetic oligonucleotide
agucacggugaggcugacg

SEQ ID NO: 6981 - RNA, 19 nt, Artificial Sequence
  Description of Artificial Sequence: Synthetic oligonucleotide
uagucacggugaggcugac

SEQ ID NO: 6982 - RNA, 19 nt, Artificial Sequence
  Description of Artificial Sequence: Synthetic oligonucleotide
uuagucacggugaggcuga

SEQ ID NO: 6983 - RNA, 19 nt, Artificial Sequence
  Description of Artificial Sequence: Synthetic oligonucleotide
guuagucacggugaggcug

SEQ ID NO: 6984 - RNA, 19 nt, Artificial Sequence
  Description of Artificial Sequence: Synthetic oligonucleotide
uguuagucacggugaggcu

SEQ ID NO: 6985 - RNA, 19 nt, Artificial Sequence
  Description of Artificial Sequence: Synthetic oligonucleotide
auguuagucacggugaggc

SEQ ID NO: 6986 - RNA, 19 nt, Artificial Sequence
  Description of Artificial Sequence: Synthetic oligonucleotide
cauguuagucacggugagg

SEQ ID NO: 6987 - RNA, 19 nt, Artificial Sequence
  Description of Artificial Sequence: Synthetic oligonucleotide
gcauguuagucacggugag

SEQ ID NO: 6988 - RNA, 19 nt, Artificial Sequence
  Description of Artificial Sequence: Synthetic oligonucleotide
ggcauguuagucacgguga

SEQ ID NO: 6989 - RNA, 19 nt, Artificial Sequence
  Description of Artificial Sequence: Synthetic oligonucleotide
uggcauguuagucacggug

SEQ ID NO: 6990 - RNA, 19 nt, Artificial Sequence
  Description of Artificial Sequence: Synthetic oligonucleotide
guggcauguuagucacggu

SEQ ID NO: 6991 - RNA, 19 nt, Artificial Sequence
  Description of Artificial Sequence: Synthetic oligonucleotide
gguggcauguuagucacgg

SEQ ID NO: 6992 - RNA, 19 nt, Artificial Sequence
  Description of Artificial Sequence: Synthetic oligonucleotide
cgguggcauguuagucacg

SEQ ID NO: 6993 - RNA, 19 nt, Artificial Sequence
  Description of Artificial Sequence: Synthetic oligonucleotide
ccgguggcauguuagucac

SEQ ID NO: 6994 - RNA, 19 nt, Artificial Sequence
  Description of Artificial Sequence: Synthetic oligonucleotide
cccgguggcauguuaguca

SEQ ID NO: 6995 - RNA, 19 nt, Artificial Sequence
  Description of Artificial Sequence: Synthetic oligonucleotide
gcccgguggcauguuaguc

SEQ ID NO: 6996 - RNA, 19 nt, Artificial Sequence
  Description of Artificial Sequence: Synthetic oligonucleotide
ugcccgguggcauguuagu

SEQ ID NO: 6997 - RNA, 19 nt, Artificial Sequence
  Description of Artificial Sequence: Synthetic oligonucleotide
uugcccgguggcauguuag

SEQ ID NO: 6998 - RNA, 19 nt, Artificial Sequence
  Description of Artificial Sequence: Synthetic oligonucleotide
cuugcccgguggcauguua

SEQ ID NO: 6999 - RNA, 19 nt, Artificial Sequence
  Description of Artificial Sequence: Synthetic oligonucleotide
gcuugcccgguggcauguu

SEQ ID NO: 7000 - RNA, 19 nt, Artificial Sequence
  Description of Artificial Sequence: Synthetic oligonucleotide
ugcuugcccgguggcaugu

SEQ ID NO: 7001 - RNA, 19 nt, Artificial Sequence
  Description of Artificial Sequence: Synthetic oligonucleotide
gugcuugcccgguggcaug

SEQ ID NO: 7002 - RNA, 19 nt, Artificial Sequence
  Description of Artificial Sequence: Synthetic oligonucleotide
agugcuugcccgguggcau

SEQ ID NO: 7003 - RNA, 19 nt, Artificial Sequence
  Description of Artificial Sequence: Synthetic oligonucleotide
aagugcuugcccgguggca

SEQ ID NO: 7004 - RNA, 19 nt, Artificial Sequence
  Description of Artificial Sequence: Synthetic oligonucleotide
gaagugcuugcccgguggc

SEQ ID NO: 7005 - RNA, 19 nt, Artificial Sequence
  Description of Artificial Sequence: Synthetic oligonucleotide
ggaagugcuugcccggugg

SEQ ID NO: 7006 - RNA, 19 nt, Artificial Sequence
  Description of Artificial Sequence: Synthetic oligonucleotide
cggaagugcuugcccggug

SEQ ID NO: 7007 - RNA, 19 nt, Artificial Sequence
  Description of Artificial Sequence: Synthetic oligonucleotide
ccggaagugcuugcccggu

SEQ ID NO: 7008 - RNA, 19 nt, Artificial Sequence
  Description of Artificial Sequence: Synthetic oligonucleotide
cccggaagugcuugcccgg

SEQ ID NO: 7009 - RNA, 19 nt, Artificial Sequence
  Description of Artificial Sequence: Synthetic oligonucleotide
acccggaagugcuugcccg

SEQ ID NO: 7010 - RNA, 19 nt, Artificial Sequence
  Description of Artificial Sequence: Synthetic oligonucleotide
uacccggaagugcuugccc

SEQ ID NO: 7011 - RNA, 19 nt, Artificial Sequence
  Description of Artificial Sequence: Synthetic oligonucleotide
cuacccggaagugcuugcc

SEQ ID NO: 7012 - RNA, 19 nt, Artificial Sequence
  Description of Artificial Sequence: Synthetic oligonucleotide
ucuacccggaagugcuugc

SEQ ID NO: 7013 - RNA, 19 nt, Artificial Sequence
  Description of Artificial Sequence: Synthetic oligonucleotide
gucuacccggaagugcuug

SEQ ID NO: 7014 - RNA, 19 nt, Artificial Sequence
  Description of Artificial Sequence: Synthetic oligonucleotide
cgucuacccggaagugcuu

SEQ ID NO: 7015 - RNA, 19 nt, Artificial Sequence
  Description of Artificial Sequence: Synthetic oligonucleotide
ccgucuacccggaagugcu

SEQ ID NO: 7016 - RNA, 19 nt, Artificial Sequence
  Description of Artificial Sequence: Synthetic oligonucleotide
gccgucuacccggaagugc

SEQ ID NO: 7017 - RNA, 19 nt, Artificial Sequence
  Description of Artificial Sequence: Synthetic oligonucleotide
ugccgucuacccggaagug

SEQ ID NO: 7018 - RNA, 19 nt, Artificial Sequence
  Description of Artificial Sequence: Synthetic oligonucleotide
gugccgucuacccggaagu

SEQ ID NO: 7019 - RNA, 19 nt, Artificial Sequence
  Description of Artificial Sequence: Synthetic oligonucleotide
ggugccgucuacccggaag

SEQ ID NO: 7020 - RNA, 19 nt, Artificial Sequence
  Description of Artificial Sequence: Synthetic oligonucleotide
aggugccgucuacccggaa

SEQ ID NO: 7021 - RNA, 19 nt, Artificial Sequence
  Description of Artificial Sequence: Synthetic oligonucleotide
gaggugccgucuacccgga

SEQ ID NO: 7022 - RNA, 19 nt, Artificial Sequence
  Description of Artificial Sequence: Synthetic oligonucleotide
ggaggugccgucuacccgg

SEQ ID NO: 7023 - RNA, 19 nt, Artificial Sequence
  Description of Artificial Sequence: Synthetic oligonucleotide
cggaggugccgucuacccg

SEQ ID NO: 7024 - RNA, 19 nt, Artificial Sequence
  Description of Artificial Sequence: Synthetic oligonucleotide
acggaggugccgucuaccc

SEQ ID NO: 7025 - RNA, 19 nt, Artificial Sequence
  Description of Artificial Sequence: Synthetic oligonucleotide
cacggaggugccgucuacc

SEQ ID NO: 7026 - RNA, 19 nt, Artificial Sequence
  Description of Artificial Sequence: Synthetic oligonucleotide
gcacggaggugccgucuac

SEQ ID NO: 7027 - RNA, 19 nt, Artificial Sequence
  Description of Artificial Sequence: Synthetic oligonucleotide
agcacggaggugccgucua

SEQ ID NO: 7028 - RNA, 19 nt, Artificial Sequence
  Description of Artificial Sequence: Synthetic oligonucleotide
cagcacggaggugccgucu

SEQ ID NO: 7029 - RNA, 19 nt, Artificial Sequence
  Description of Artificial Sequence: Synthetic oligonucleotide
ucagcacggaggugccguc

SEQ ID NO: 7030 - RNA, 19 nt, Artificial Sequence
  Description of Artificial Sequence: Synthetic oligonucleotide
cucagcacggaggugccgu

SEQ ID NO: 7031 - RNA, 19 nt, Artificial Sequence
  Description of Artificial Sequence: Synthetic oligonucleotide
ucucagcacggaggugccg

SEQ ID NO: 7032 - RNA, 19 nt, Artificial Sequence
  Description of Artificial Sequence: Synthetic oligonucleotide
cucucagcacggaggugcc

SEQ ID NO: 7033 - RNA, 19 nt, Artificial Sequence
  Description of Artificial Sequence: Synthetic oligonucleotide
ccucucagcacggaggugc

SEQ ID NO: 7034 - RNA, 19 nt, Artificial Sequence
  Description of Artificial Sequence: Synthetic oligonucleotide
gccucucagcacggaggug

SEQ ID NO: 7035 - RNA, 19 nt, Artificial Sequence
  Description of Artificial Sequence: Synthetic oligonucleotide
agccucucagcacggaggu

SEQ ID NO: 7036 - RNA, 19 nt, Artificial Sequence
  Description of Artificial Sequence: Synthetic oligonucleotide
aagccucucagcacggagg

SEQ ID NO: 7037 - RNA, 19 nt, Artificial Sequence
  Description of Artificial Sequence: Synthetic oligonucleotide
gaagccucucagcacggag

SEQ ID NO: 7038 - RNA, 19 nt, Artificial Sequence
  Description of Artificial Sequence: Synthetic oligonucleotide
agaagccucucagcacgga

SEQ ID NO: 7039 - RNA, 19 nt, Artificial Sequence
  Description of Artificial Sequence: Synthetic oligonucleotide
gagaagccucucagcacgg

SEQ ID NO: 7040 - RNA, 19 nt, Artificial Sequence
  Description of Artificial Sequence: Synthetic oligonucleotide
agagaagccucucagcacg

SEQ ID NO: 7041 - RNA, 19 nt, Artificial Sequence
  Description of Artificial Sequence: Synthetic oligonucleotide
aagagaagccucucagcac

SEQ ID NO: 7042 - RNA, 19 nt, Artificial Sequence
  Description of Artificial Sequence: Synthetic oligonucleotide
aaagagaagccucucagca

SEQ ID NO: 7043 - RNA, 19 nt, Artificial Sequence
  Description of Artificial Sequence: Synthetic oligonucleotide
gaaagagaagccucucagc

SEQ ID NO: 7044 - RNA, 19 nt, Artificial Sequence
  Description of Artificial Sequence: Synthetic oligonucleotide
ugaaagagaagccucucag

SEQ ID NO: 7045 - RNA, 19 nt, Artificial Sequence
  Description of Artificial Sequence: Synthetic oligonucleotide
augaaagagaagccucuca

SEQ ID NO: 7046 - RNA, 19 nt, Artificial Sequence
  Description of Artificial Sequence: Synthetic oligonucleotide
caugaaagagaagccucuc

SEQ ID NO: 7047 - RNA, 19 nt, Artificial Sequence
  Description of Artificial Sequence: Synthetic oligonucleotide
ccaugaaagagaagccucu

SEQ ID NO: 7048 - RNA, 19 nt, Artificial Sequence
  Description of Artificial Sequence: Synthetic oligonucleotide
uccaugaaagagaagccuc

SEQ ID NO: 7049 - RNA, 19 nt, Artificial Sequence
  Description of Artificial Sequence: Synthetic oligonucleotide
cuccaugaaagagaagccu

SEQ ID NO: 7050 - RNA, 19 nt, Artificial Sequence
  Description of Artificial Sequence: Synthetic oligonucleotide
gcuccaugaaagagaagcc

SEQ ID NO: 7051 - RNA, 19 nt, Artificial Sequence
  Description of Artificial Sequence: Synthetic oligonucleotide
ggcuccaugaaagagaagc

SEQ ID NO: 7052 - RNA, 19 nt, Artificial Sequence
  Description of Artificial Sequence: Synthetic oligonucleotide
uggcuccaugaaagagaag

SEQ ID NO: 7053 - RNA, 19 nt, Artificial Sequence
  Description of Artificial Sequence: Synthetic oligonucleotide
cuggcuccaugaaagagaa

SEQ ID NO: 7054 - RNA, 19 nt, Artificial Sequence
  Description of Artificial Sequence: Synthetic oligonucleotide
acuggcuccaugaaagaga

SEQ ID NO: 7055 - RNA, 19 nt, Artificial Sequence
  Description of Artificial Sequence: Synthetic oligonucleotide
cacuggcuccaugaaagag

SEQ ID NO: 7056 - RNA, 19 nt, Artificial Sequence
  Description of Artificial Sequence: Synthetic oligonucleotide
gcacuggcuccaugaaaga

SEQ ID NO: 7057 - RNA, 19 nt, Artificial Sequence
  Description of Artificial Sequence: Synthetic oligonucleotide
agcacuggcuccaugaaag

SEQ ID NO: 7058 - RNA, 19 nt, Artificial Sequence
  Description of Artificial Sequence: Synthetic oligonucleotide
cagcacuggcuccaugaaa

SEQ ID NO: 7059 - RNA, 19 nt, Artificial Sequence
  Description of Artificial Sequence: Synthetic oligonucleotide
ucagcacuggcuccaugaa

SEQ ID NO: 7060 - RNA, 19 nt, Artificial Sequence
  Description of Artificial Sequence: Synthetic oligonucleotide
aucagcacuggcuccauga

SEQ ID NO: 7061 - RNA, 19 nt, Artificial Sequence
  Description of Artificial Sequence: Synthetic oligonucleotide
uaucagcacuggcuccaug

SEQ ID NO: 7062 - RNA, 19 nt, Artificial Sequence
  Description of Artificial Sequence: Synthetic oligonucleotide
cuaucagcacuggcuccau

SEQ ID NO: 7063 - RNA, 19 nt, Artificial Sequence
  Description of Artificial Sequence: Synthetic oligonucleotide
gcuaucagcacuggcucca

SEQ ID NO: 7064 - RNA, 19 nt, Artificial Sequence
  Description of Artificial Sequence: Synthetic oligonucleotide
ugcuaucagcacuggcucc

SEQ ID NO: 7065 - RNA, 19 nt, Artificial Sequence
  Description of Artificial Sequence: Synthetic oligonucleotide
cugcuaucagcacuggcuc

SEQ ID NO: 7066 - RNA, 19 nt, Artificial Sequence
  Description of Artificial Sequence: Synthetic oligonucleotide
acugcuaucagcacuggcu

SEQ ID NO: 7067 - RNA, 19 nt, Artificial Sequence
  Description of Artificial Sequence: Synthetic oligonucleotide
cacugcuaucagcacuggc

SEQ ID NO: 7068 - RNA, 19 nt, Artificial Sequence
  Description of Artificial Sequence: Synthetic oligonucleotide
gcacugcuaucagcacugg

SEQ ID NO: 7069 - RNA, 19 nt, Artificial Sequence
  Description of Artificial Sequence: Synthetic oligonucleotide
ugcacugcuaucagcacug

SEQ ID NO: 7070 - RNA, 19 nt, Artificial Sequence
  Description of Artificial Sequence: Synthetic oligonucleotide
uugcacugcuaucagcacu

SEQ ID NO: 7071 - RNA, 19 nt, Artificial Sequence
  Description of Artificial Sequence: Synthetic oligonucleotide
guugcacugcuaucagcac

SEQ ID NO: 7072 - RNA, 19 nt, Artificial Sequence
  Description of Artificial Sequence: Synthetic oligonucleotide
gguugcacugcuaucagca

SEQ ID NO: 7073 - RNA, 19 nt, Artificial Sequence
  Description of Artificial Sequence: Synthetic oligonucleotide
ggguugcacugcuaucagc

SEQ ID NO: 7074 - RNA, 19 nt, Artificial Sequence
  Description of Artificial Sequence: Synthetic oligonucleotide
gggguugcacugcuaucag

SEQ ID NO: 7075 - RNA, 19 nt, Artificial Sequence
  Description of Artificial Sequence: Synthetic oligonucleotide
agggguugcacugcuauca

SEQ ID NO: 7076 - RNA, 19 nt, Artificial Sequence
  Description of Artificial Sequence: Synthetic oligonucleotide
gagggguugcacugcuauc

SEQ ID NO: 7077 - RNA, 19 nt, Artificial Sequence
  Description of Artificial Sequence: Synthetic oligonucleotide
agagggguugcacugcuau

SEQ ID NO: 7078 - RNA, 19 nt, Artificial Sequence
  Description of Artificial Sequence: Synthetic oligonucleotide
aagagggguugcacugcua

SEQ ID NO: 7079 - RNA, 19 nt, Artificial Sequence
  Description of Artificial Sequence: Synthetic oligonucleotide
aaagagggguugcacugcu

SEQ ID NO: 7080 - RNA, 19 nt, Artificial Sequence
  Description of Artificial Sequence: Synthetic oligonucleotide
caaagagggguugcacugc

SEQ ID NO: 7081 - RNA, 19 nt, Artificial Sequence
  Description of Artificial Sequence: Synthetic oligonucleotide
ccaaagagggguugcacug

SEQ ID NO: 7082 - RNA, 19 nt, Artificial Sequence
  Description of Artificial Sequence: Synthetic oligonucleotide
gccaaagagggguugcacu

SEQ ID NO: 7083 - RNA, 19 nt, Artificial Sequence
  Description of Artificial Sequence: Synthetic oligonucleotide
ggccaaagagggguugcac

SEQ ID NO: 7084 - RNA, 19 nt, Artificial Sequence
  Description of Artificial Sequence: Synthetic oligonucleotide
gggccaaagagggguugca

SEQ ID NO: 7085 - RNA, 19 nt, Artificial Sequence
  Description of Artificial Sequence: Synthetic oligonucleotide
ugggccaaagagggguugc

SEQ ID NO: 7086 - RNA, 19 nt, Artificial Sequence
  Description of Artificial Sequence: Synthetic oligonucleotide
gugggccaaagagggguug

SEQ ID NO: 7087 - RNA, 19 nt, Artificial Sequence
  Description of Artificial Sequence: Synthetic oligonucleotide
cgugggccaaagagggguu

SEQ ID NO: 7088 - RNA, 19 nt, Artificial Sequence
  Description of Artificial Sequence: Synthetic oligonucleotide
ccgugggccaaagaggggu

SEQ ID NO: 7089 - RNA, 19 nt, Artificial Sequence
  Description of Artificial Sequence: Synthetic oligonucleotide
cccgugggccaaagagggg

SEQ ID NO: 7090 - RNA, 19 nt, Artificial Sequence
  Description of Artificial Sequence: Synthetic oligonucleotide
gcccgugggccaaagaggg

SEQ ID NO: 7091 - RNA, 19 nt, Artificial Sequence
  Description of Artificial Sequence: Synthetic oligonucleotide
ugcccgugggccaaagagg

SEQ ID NO: 7092 - RNA, 19 nt, Artificial Sequence
  Description of Artificial Sequence: Synthetic oligonucleotide
cugcccgugggccaaagag

SEQ ID NO: 7093 - RNA, 19 nt, Artificial Sequence
  Description of Artificial Sequence: Synthetic oligonucleotide
ccugcccgugggccaaaga

SEQ ID NO: 7094 - RNA, 19 nt, Artificial Sequence
  Description of Artificial Sequence: Synthetic oligonucleotide
uccugcccgugggccaaag

SEQ ID NO: 7095 - RNA, 19 nt, Artificial Sequence
  Description of Artificial Sequence: Synthetic oligonucleotide
cuccugcccgugggccaaa

SEQ ID NO: 7096 - RNA, 19 nt, Artificial Sequence
  Description of Artificial Sequence: Synthetic oligonucleotide
ccuccugcccgugggccaa

SEQ ID NO: 7097 - RNA, 19 nt, Artificial Sequence
  Description of Artificial Sequence: Synthetic oligonucleotide
gccuccugcccgugggcca

SEQ ID NO: 7098 - RNA, 19 nt, Artificial Sequence
  Description of Artificial Sequence: Synthetic oligonucleotide
ugccuccugcccgugggcc

SEQ ID NO: 7099 - RNA, 19 nt, Artificial Sequence
  Description of Artificial Sequence: Synthetic oligonucleotide
gugccuccugcccgugggc

SEQ ID NO: 7100 - RNA, 19 nt, Artificial Sequence
  Description of Artificial Sequence: Synthetic oligonucleotide
ggugccuccugcccguggg

SEQ ID NO: 7101 - RNA, 19 nt, Artificial Sequence
  Description of Artificial Sequence: Synthetic oligonucleotide
aggugccuccugcccgugg

SEQ ID NO: 7102 - RNA, 19 nt, Artificial Sequence
  Description of Artificial Sequence: Synthetic oligonucleotide
caggugccuccugcccgug

SEQ ID NO: 7103 - RNA, 19 nt, Artificial Sequence
  Description of Artificial Sequence: Synthetic oligonucleotide
acaggugccuccugcccgu

SEQ ID NO: 7104 - RNA, 19 nt, Artificial Sequence
  Description of Artificial Sequence: Synthetic oligonucleotide
gacaggugccuccugcccg

SEQ ID NO: 7105 - RNA, 19 nt, Artificial Sequence
  Description of Artificial Sequence: Synthetic oligonucleotide
agacaggugccuccugccc

SEQ ID NO: 7106 - RNA, 19 nt, Artificial Sequence
  Description of Artificial Sequence: Synthetic oligonucleotide
gagacaggugccuccugcc

SEQ ID NO: 7107 - RNA, 19 nt, Artificial Sequence
  Description of Artificial Sequence: Synthetic oligonucleotide
ugagacaggugccuccugc

SEQ ID NO: 7108 - RNA, 19 nt, Artificial Sequence
  Description of Artificial Sequence: Synthetic oligonucleotide
gugagacaggugccuccug

SEQ ID NO: 7109 - RNA, 19 nt, Artificial Sequence
  Description of Artificial Sequence: Synthetic oligonucleotide
agugagacaggugccuccu

SEQ ID NO: 7110 - RNA, 19 nt, Artificial Sequence
  Description of Artificial Sequence: Synthetic oligonucleotide
gagugagacaggugccucc

SEQ ID NO: 7111 - RNA, 19 nt, Artificial Sequence
  Description of Artificial Sequence: Synthetic oligonucleotide
agagugagacaggugccuc

SEQ ID NO: 7112 - RNA, 19 nt, Artificial Sequence
  Description of Artificial Sequence: Synthetic oligonucleotide
aagagugagacaggugccu

SEQ ID NO: 7113 - RNA, 19 nt, Artificial Sequence
  Description of Artificial Sequence: Synthetic oligonucleotide
caagagugagacaggugcc

SEQ ID NO: 7114 - RNA, 19 nt, Artificial Sequence
  Description of Artificial Sequence: Synthetic oligonucleotide
ucaagagugagacaggugc

SEQ ID NO: 7115 - RNA, 19 nt, Artificial Sequence
  Description of Artificial Sequence: Synthetic oligonucleotide
uucaagagugagacaggug

SEQ ID NO: 7116 - RNA, 19 nt, Artificial Sequence
  Description of Artificial Sequence: Synthetic oligonucleotide
cuucaagagugagacaggu

SEQ ID NO: 7117 - RNA, 19 nt, Artificial Sequence
  Description of Artificial Sequence: Synthetic oligonucleotide
ccuucaagagugagacagg

SEQ ID NO: 7118 - RNA, 19 nt, Artificial Sequence
  Description of Artificial Sequence: Synthetic oligonucleotide
gccuucaagagugagacag

SEQ ID NO: 7119 - RNA, 19 nt, Artificial Sequence
  Description of Artificial Sequence: Synthetic oligonucleotide
ggccuucaagagugagaca

SEQ ID NO: 7120 - RNA, 19 nt, Artificial Sequence
  Description of Artificial Sequence: Synthetic oligonucleotide
uggccuucaagagugagac

SEQ ID NO: 7121 - RNA, 19 nt, Artificial Sequence
  Description of Artificial Sequence: Synthetic oligonucleotide
cuggccuucaagagugaga

SEQ ID NO: 7122 - RNA, 19 nt, Artificial Sequence
  Description of Artificial Sequence: Synthetic oligonucleotide
ucuggccuucaagagugag

SEQ ID NO: 7123 - RNA, 19 nt, Artificial Sequence
  Description of Artificial Sequence: Synthetic oligonucleotide
cucuggccuucaagaguga

SEQ ID NO: 7124 - RNA, 19 nt, Artificial Sequence
  Description of Artificial Sequence: Synthetic oligonucleotide
acucuggccuucaagagug

SEQ ID NO: 7125 - RNA, 19 nt, Artificial Sequence
  Description of Artificial Sequence: Synthetic oligonucleotide
gacucuggccuucaagagu

SEQ ID NO: 7126 - RNA, 19 nt, Artificial Sequence
  Description of Artificial Sequence: Synthetic oligonucleotide
agacucuggccuucaagag

SEQ ID NO: 7127 - RNA, 19 nt, Artificial Sequence
  Description of Artificial Sequence: Synthetic oligonucleotide
cagacucuggccuucaaga

SEQ ID NO: 7128 - RNA, 19 nt, Artificial Sequence
  Description of Artificial Sequence: Synthetic oligonucleotide
acagacucuggccuucaag

SEQ ID NO: 7129 - RNA, 19 nt, Artificial Sequence
  Description of Artificial Sequence: Synthetic oligonucleotide
gacagacucuggccuucaa

SEQ ID NO: 7130 - RNA, 19 nt, Artificial Sequence
  Description of Artificial Sequence: Synthetic oligonucleotide
agacagacucuggccuuca

SEQ ID NO: 7131 - RNA, 19 nt, Artificial Sequence
  Description of Artificial Sequence: Synthetic oligonucleotide
cagacagacucuggccuuc

SEQ ID NO: 7132 - RNA, 19 nt, Artificial Sequence
  Description of Artificial Sequence: Synthetic oligonucleotide
acagacagacucuggccuu

SEQ ID NO: 7133 - RNA, 19 nt, Artificial Sequence
  Description of Artificial Sequence: Synthetic oligonucleotide
uacagacagacucuggccu

SEQ ID NO: 7134 - RNA, 19 nt, Artificial Sequence
  Description of Artificial Sequence: Synthetic oligonucleotide
cuacagacagacucuggcc

SEQ ID NO: 7135 - RNA, 19 nt, Artificial Sequence
  Description of Artificial Sequence: Synthetic oligonucleotide
ccuacagacagacucuggc

SEQ ID NO: 7136 - RNA, 19 nt, Artificial Sequence
  Description of Artificial Sequence: Synthetic oligonucleotide
gccuacagacagacucugg

SEQ ID NO: 7137 - RNA, 19 nt, Artificial Sequence
  Description of Artificial Sequence: Synthetic oligonucleotide
ugccuacagacagacucug

SEQ ID NO: 7138 - RNA, 19 nt, Artificial Sequence
  Description of Artificial Sequence: Synthetic oligonucleotide
gugccuacagacagacucu

SEQ ID NO: 7139 - RNA, 19 nt, Artificial Sequence
  Description of Artificial Sequence: Synthetic oligonucleotide
ggugccuacagacagacuc

SEQ ID NO: 7140 - RNA, 19 nt, Artificial Sequence
  Description of Artificial Sequence: Synthetic oligonucleotide
uggugccuacagacagacu

SEQ ID NO: 7141 - RNA, 19 nt, Artificial Sequence
  Description of Artificial Sequence: Synthetic oligonucleotide
cuggugccuacagacagac

SEQ ID NO: 7142 - RNA, 19 nt, Artificial Sequence
  Description of Artificial Sequence: Synthetic oligonucleotide
gcuggugccuacagacaga

SEQ ID NO: 7143 - RNA, 19 nt, Artificial Sequence
  Description of Artificial Sequence: Synthetic oligonucleotide
ggcuggugccuacagacag

SEQ ID NO: 7144 - RNA, 19 nt, Artificial Sequence
  Description of Artificial Sequence: Synthetic oligonucleotide
cggcuggugccuacagaca

SEQ ID NO: 7145 - RNA, 19 nt, Artificial Sequence
  Description of Artificial Sequence: Synthetic oligonucleotide
ccggcuggugccuacagac

SEQ ID NO: 7146 - RNA, 19 nt, Artificial Sequence
  Description of Artificial Sequence: Synthetic oligonucleotide
cccggcuggugccuacaga

SEQ ID NO: 7147 - RNA, 19 nt, Artificial Sequence
  Description of Artificial Sequence: Synthetic oligonucleotide
gcccggcuggugccuacag

SEQ ID NO: 7148 - RNA, 19 nt, Artificial Sequence
  Description of Artificial Sequence: Synthetic oligonucleotide
agcccggcuggugccuaca

SEQ ID NO: 7149 - RNA, 19 nt, Artificial Sequence
  Description of Artificial Sequence: Synthetic oligonucleotide
cagcccggcuggugccuac

SEQ ID NO: 7150 - RNA, 19 nt, Artificial Sequence
  Description of Artificial Sequence: Synthetic oligonucleotide
acagcccggcuggugccua

SEQ ID NO: 7151 - RNA, 19 nt, Artificial Sequence
  Description of Artificial Sequence: Synthetic oligonucleotide
cacagcccggcuggugccu

SEQ ID NO: 7152 - RNA, 19 nt, Artificial Sequence
  Description of Artificial Sequence: Synthetic oligonucleotide
gcacagcccggcuggugcc

SEQ ID NO: 7153 - RNA, 19 nt, Artificial Sequence
  Description of Artificial Sequence: Synthetic oligonucleotide
agcacagcccggcuggugc

SEQ ID NO: 7154 - RNA, 19 nt, Artificial Sequence
  Description of Artificial Sequence: Synthetic oligonucleotide
cagcacagcccggcuggug

SEQ ID NO: 7155 - RNA, 19 nt, Artificial Sequence
  Description of Artificial Sequence: Synthetic oligonucleotide
ccagcacagcccggcuggu

SEQ ID NO: 7156 - RNA, 19 nt, Artificial Sequence
  Description of Artificial Sequence: Synthetic oligonucleotide
accagcacagcccggcugg

SEQ ID NO: 7157 - RNA, 19 nt, Artificial Sequence
  Description of Artificial Sequence: Synthetic oligonucleotide
gaccagcacagcccggcug

SEQ ID NO: 7158 - RNA, 19 nt, Artificial Sequence
  Description of Artificial Sequence: Synthetic oligonucleotide
ugaccagcacagcccggcu

SEQ ID NO: 7159 - RNA, 19 nt, Artificial Sequence
  Description of Artificial Sequence: Synthetic oligonucleotide
uugaccagcacagcccggc

SEQ ID NO: 7160 - RNA, 19 nt, Artificial Sequence
  Description of Artificial Sequence: Synthetic oligonucleotide
auugaccagcacagcccgg

SEQ ID NO: 7161 - RNA, 19 nt, Artificial Sequence
  Description of Artificial Sequence: Synthetic oligonucleotide
cauugaccagcacagcccg

SEQ ID NO: 7162 - RNA, 19 nt, Artificial Sequence
  Description of Artificial Sequence: Synthetic oligonucleotide
ccauugaccagcacagccc

SEQ ID NO: 7163 - RNA, 19 nt, Artificial Sequence
  Description of Artificial Sequence: Synthetic oligonucleotide
cccauugaccagcacagcc

SEQ ID NO: 7164 - RNA, 19 nt, Artificial Sequence
  Description of Artificial Sequence: Synthetic oligonucleotide
ucccauugaccagcacagc

SEQ ID NO: 7165 - RNA, 19 nt, Artificial Sequence
  Description of Artificial Sequence: Synthetic oligonucleotide
gucccauugaccagcacag

SEQ ID NO: 7166 - RNA, 19 nt, Artificial Sequence
  Description of Artificial Sequence: Synthetic oligonucleotide
agucccauugaccagcaca

SEQ ID NO: 7167 - RNA, 19 nt, Artificial Sequence
  Description of Artificial Sequence: Synthetic oligonucleotide
cagucccauugaccagcac

SEQ ID NO: 7168 - RNA, 19 nt, Artificial Sequence
  Description of Artificial Sequence: Synthetic oligonucleotide
ucagucccauugaccagca

SEQ ID NO: 7169 - RNA, 19 nt, Artificial Sequence
  Description of Artificial Sequence: Synthetic oligonucleotide
cucagucccauugaccagc

SEQ ID NO: 7170 - RNA, 19 nt, Artificial Sequence
  Description of Artificial Sequence: Synthetic oligonucleotide
acucagucccauugaccag

SEQ ID NO: 7171 - RNA, 19 nt, Artificial Sequence
  Description of Artificial Sequence: Synthetic oligonucleotide
cacucagucccauugacca

SEQ ID NO: 7172 - RNA, 19 nt, Artificial Sequence
  Description of Artificial Sequence: Synthetic oligonucleotide
acacucagucccauugacc

SEQ ID NO: 7173 - RNA, 19 nt, Artificial Sequence
  Description of Artificial Sequence: Synthetic oligonucleotide
gacacucagucccauugac

SEQ ID NO: 7174 - RNA, 19 nt, Artificial Sequence
  Description of Artificial Sequence: Synthetic oligonucleotide
agacacucagucccauuga

SEQ ID NO: 7175 - RNA, 19 nt, Artificial Sequence
  Description of Artificial Sequence: Synthetic oligonucleotide
cagacacucagucccauug

SEQ ID NO: 7176 - RNA, 19 nt, Artificial Sequence
  Description of Artificial Sequence: Synthetic oligonucleotide
gcagacacucagucccauu

SEQ ID NO: 7177 - RNA, 19 nt, Artificial Sequence
  Description of Artificial Sequence: Synthetic oligonucleotide
agcagacacucagucccau

SEQ ID NO: 7178 - RNA, 19 nt, Artificial Sequence
  Description of Artificial Sequence: Synthetic oligonucleotide
uagcagacacucaguccca

SEQ ID NO: 7179 - RNA, 19 nt, Artificial Sequence
  Description of Artificial Sequence: Synthetic oligonucleotide
cuagcagacacucaguccc

SEQ ID NO: 7180 - RNA, 19 nt, Artificial Sequence
  Description of Artificial Sequence: Synthetic oligonucleotide
gcuagcagacacucagucc

SEQ ID NO: 7181 - RNA, 19 nt, Artificial Sequence
  Description of Artificial Sequence: Synthetic oligonucleotide
ugcuagcagacacucaguc

SEQ ID NO: 7182 - RNA, 19 nt, Artificial Sequence
  Description of Artificial Sequence: Synthetic oligonucleotide
gugcuagcagacacucagu

SEQ ID NO: 7183 - RNA, 19 nt, Artificial Sequence
  Description of Artificial Sequence: Synthetic oligonucleotide
cgugcuagcagacacucag

SEQ ID NO: 7184 - RNA, 19 nt, Artificial Sequence
  Description of Artificial Sequence: Synthetic oligonucleotide
ccgugcuagcagacacuca

SEQ ID NO: 7185 - RNA, 19 nt, Artificial Sequence
  Description of Artificial Sequence: Synthetic oligonucleotide
cccgugcuagcagacacuc

SEQ ID NO: 7186 - RNA, 19 nt, Artificial Sequence
  Description of Artificial Sequence: Synthetic oligonucleotide
acccgugcuagcagacacu

SEQ ID NO: 7187 - RNA, 19 nt, Artificial Sequence
  Description of Artificial Sequence: Synthetic oligonucleotide
gacccgugcuagcagacac

SEQ ID NO: 7188 - RNA, 19 nt, Artificial Sequence
  Description of Artificial Sequence: Synthetic oligonucleotide
ugacccgugcuagcagaca

SEQ ID NO: 7189 - RNA, 19 nt, Artificial Sequence
  Description of Artificial Sequence: Synthetic oligonucleotide
cugacccgugcuagcagac

SEQ ID NO: 7190 - RNA, 19 nt, Artificial Sequence
  Description of Artificial Sequence: Synthetic oligonucleotide
acugacccgugcuagcaga

SEQ ID NO: 7191 - RNA, 19 nt, Artificial Sequence
  Description of Artificial Sequence: Synthetic oligonucleotide
cacugacccgugcuagcag

SEQ ID NO: 7192 - RNA, 19 nt, Artificial Sequence
  Description of Artificial Sequence: Synthetic oligonucleotide
ucacugacccgugcuagca

SEQ ID NO: 7193 - RNA, 19 nt, Artificial Sequence
  Description of Artificial Sequence: Synthetic oligonucleotide
cucacugacccgugcuagc

SEQ ID NO: 7194 - RNA, 19 nt, Artificial Sequence
  Description of Artificial Sequence: Synthetic oligonucleotide
ccucacugacccgugcuag

SEQ ID NO: 7195 - RNA, 19 nt, Artificial Sequence
  Description of Artificial Sequence: Synthetic oligonucleotide
cccucacugacccgugcua

SEQ ID NO: 7196 - RNA, 19 nt, Artificial Sequence
  Description of Artificial Sequence: Synthetic oligonucleotide
ccccucacugacccgugcu

SEQ ID NO: 7197 - RNA, 19 nt, Artificial Sequence
  Description of Artificial Sequence: Synthetic oligonucleotide
gccccucacugacccgugc

SEQ ID NO: 7198 - RNA, 19 nt, Artificial Sequence
  Description of Artificial Sequence: Synthetic oligonucleotide
ugccccucacugacccgug

SEQ ID NO: 7199 - RNA, 19 nt, Artificial Sequence
  Description of Artificial Sequence: Synthetic oligonucleotide
cugccccucacugacccgu

SEQ ID NO: 7200 - RNA, 19 nt, Artificial Sequence
  Description of Artificial Sequence: Synthetic oligonucleotide
gcugccccucacugacccg

SEQ ID NO: 7201 - RNA, 19 nt, Artificial Sequence
  Description of Artificial Sequence: Synthetic oligonucleotide
agcugccccucacugaccc

SEQ ID NO: 7202 - RNA, 19 nt, Artificial Sequence
  Description of Artificial Sequence: Synthetic oligonucleotide
aagcugccccucacugacc

SEQ ID NO: 7203 - RNA, 19 nt, Artificial Sequence
  Description of Artificial Sequence: Synthetic oligonucleotide
aaagcugccccucacugac

SEQ ID NO: 7204 - RNA, 19 nt, Artificial Sequence
  Description of Artificial Sequence: Synthetic oligonucleotide
aaaagcugccccucacuga

SEQ ID NO: 7205 - RNA, 19 nt, Artificial Sequence
  Description of Artificial Sequence: Synthetic oligonucleotide
uaaaagcugccccucacug

SEQ ID NO: 7206 - RNA, 19 nt, Artificial Sequence
  Description of Artificial Sequence: Synthetic oligonucleotide
auaaaagcugccccucacu

SEQ ID NO: 7207 - RNA, 19 nt, Artificial Sequence
  Description of Artificial Sequence: Synthetic oligonucleotide
cauaaaagcugccccucac

SEQ ID NO: 7208 - RNA, 19 nt, Artificial Sequence
  Description of Artificial Sequence: Synthetic oligonucleotide
acauaaaagcugccccuca

SEQ ID NO: 7209 - RNA, 19 nt, Artificial Sequence
  Description of Artificial Sequence: Synthetic oligonucleotide
cacauaaaagcugccccuc

SEQ ID NO: 7210 - RNA, 19 nt, Artificial Sequence
  Description of Artificial Sequence: Synthetic oligonucleotide
gcacauaaaagcugccccu

SEQ ID NO: 7211 - RNA, 19 nt, Artificial Sequence
  Description of Artificial Sequence: Synthetic oligonucleotide
ggcacauaaaagcugcccc

SEQ ID NO: 7212 - RNA, 19 nt, Artificial Sequence
  Description of Artificial Sequence: Synthetic oligonucleotide
uggcacauaaaagcugccc

SEQ ID NO: 7213 - RNA, 19 nt, Artificial Sequence
  Description of Artificial Sequence: Synthetic oligonucleotide
guggcacauaaaagcugcc

SEQ ID NO: 7214 - RNA, 19 nt, Artificial Sequence
  Description of Artificial Sequence: Synthetic oligonucleotide
uguggcacauaaaagcugc

SEQ ID NO: 7215 - RNA, 19 nt, Artificial Sequence
  Description of Artificial Sequence: Synthetic oligonucleotide
guguggcacauaaaagcug

SEQ ID NO: 7216 - RNA, 19 nt, Artificial Sequence
  Description of Artificial Sequence: Synthetic oligonucleotide
gguguggcacauaaaagcu

SEQ ID NO: 7217 - RNA, 19 nt, Artificial Sequence
  Description of Artificial Sequence: Synthetic oligonucleotide
ggguguggcacauaaaagc

SEQ ID NO: 7218 - RNA, 19 nt, Artificial Sequence
  Description of Artificial Sequence: Synthetic oligonucleotide
gggguguggcacauaaaag

SEQ ID NO: 7219 - RNA, 19 nt, Artificial Sequence
  Description of Artificial Sequence: Synthetic oligonucleotide
ggggguguggcacauaaaa

SEQ ID NO: 7220 - RNA, 19 nt, Artificial Sequence
  Description of Artificial Sequence: Synthetic oligonucleotide
aggggguguggcacauaaa

SEQ ID NO: 7221 - RNA, 19 nt, Artificial Sequence
  Description of Artificial Sequence: Synthetic oligonucleotide
caggggguguggcacauaa

SEQ ID NO: 7222 - RNA, 19 nt, Artificial Sequence
  Description of Artificial Sequence: Synthetic oligonucleotide
ccaggggguguggcacaua

SEQ ID NO: 7223 - RNA, 19 nt, Artificial Sequence
  Description of Artificial Sequence: Synthetic oligonucleotide
cccaggggguguggcacau

SEQ ID NO: 7224 - RNA, 19 nt, Artificial Sequence
  Description of Artificial Sequence: Synthetic oligonucleotide
ccccaggggguguggcaca

SEQ ID NO: 7225 - RNA, 19 nt, Artificial Sequence
  Description of Artificial Sequence: Synthetic oligonucleotide
gccccaggggguguggcac

SEQ ID NO: 7226 - RNA, 19 nt, Artificial Sequence
  Description of Artificial Sequence: Synthetic oligonucleotide
ggccccaggggguguggca

SEQ ID NO: 7227 - RNA, 19 nt, Artificial Sequence
  Description of Artificial Sequence: Synthetic oligonucleotide
uggccccaggggguguggc

SEQ ID NO: 7228 - RNA, 19 nt, Artificial Sequence
  Description of Artificial Sequence: Synthetic oligonucleotide
guggccccagggggugugg

SEQ ID NO: 7229 - RNA, 19 nt, Artificial Sequence
  Description of Artificial Sequence: Synthetic oligonucleotide
cguggccccagggggugug

SEQ ID NO: 7230 - RNA, 19 nt, Artificial Sequence
  Description of Artificial Sequence: Synthetic oligonucleotide
ccguggccccagggggugu

SEQ ID NO: 7231 - RNA, 19 nt, Artificial Sequence
  Description of Artificial Sequence: Synthetic oligonucleotide
accguggccccagggggug

SEQ ID NO: 7232 - RNA, 19 nt, Artificial Sequence
  Description of Artificial Sequence: Synthetic oligonucleotide
caccguggccccagggggu

SEQ ID NO: 7233 - RNA, 19 nt, Artificial Sequence
  Description of Artificial Sequence: Synthetic oligonucleotide
ccaccguggccccaggggg

SEQ ID NO: 7234 - RNA, 19 nt, Artificial Sequence
  Description of Artificial Sequence: Synthetic oligonucleotide
gccaccguggccccagggg

SEQ ID NO: 7235 - RNA, 19 nt, Artificial Sequence
  Description of Artificial Sequence: Synthetic oligonucleotide
ggccaccguggccccaggg

SEQ ID NO: 7236 - RNA, 19 nt, Artificial Sequence
  Description of Artificial Sequence: Synthetic oligonucleotide
uggccaccguggccccagg

SEQ ID NO: 7237 - RNA, 19 nt, Artificial Sequence
  Description of Artificial Sequence: Synthetic oligonucleotide
cuggccaccguggccccag

SEQ ID NO: 7238 - RNA, 19 nt, Artificial Sequence
  Description of Artificial Sequence: Synthetic oligonucleotide
acuggccaccguggcccca

SEQ ID NO: 7239 - RNA, 19 nt, Artificial Sequence
  Description of Artificial Sequence: Synthetic oligonucleotide
cacuggccaccguggcccc

SEQ ID NO: 7240 - RNA, 19 nt, Artificial Sequence
  Description of Artificial Sequence: Synthetic oligonucleotide
acacuggccaccguggccc

SEQ ID NO: 7241 - RNA, 19 nt, Artificial Sequence
  Description of Artificial Sequence: Synthetic oligonucleotide
gacacuggccaccguggcc

SEQ ID NO: 7242 - RNA, 19 nt, Artificial Sequence
  Description of Artificial Sequence: Synthetic oligonucleotide
ggacacuggccaccguggc

SEQ ID NO: 7243 - RNA, 19 nt, Artificial Sequence
  Description of Artificial Sequence: Synthetic oligonucleotide
gggacacuggccaccgugg

SEQ ID NO: 7244 - RNA, 19 nt, Artificial Sequence
  Description of Artificial Sequence: Synthetic oligonucleotide
ggggacacuggccaccgug

SEQ ID NO: 7245 - RNA, 19 nt, Artificial Sequence
  Description of Artificial Sequence: Synthetic oligonucleotide
gggggacacuggccaccgu

SEQ ID NO: 7246 - RNA, 19 nt, Artificial Sequence
  Description of Artificial Sequence: Synthetic oligonucleotide
agggggacacuggccaccg

SEQ ID NO: 7247 - RNA, 19 nt, Artificial Sequence
  Description of Artificial Sequence: Synthetic oligonucleotide
aagggggacacuggccacc

SEQ ID NO: 7248 - RNA, 19 nt, Artificial Sequence
  Description of Artificial Sequence: Synthetic oligonucleotide
uaagggggacacuggccac

SEQ ID NO: 7249 - RNA, 19 nt, Artificial Sequence
  Description of Artificial Sequence: Synthetic oligonucleotide
cuaagggggacacuggcca

SEQ ID NO: 7250 - RNA, 19 nt, Artificial Sequence
  Description of Artificial Sequence: Synthetic oligonucleotide
gcuaagggggacacuggcc

SEQ ID NO: 7251 - RNA, 19 nt, Artificial Sequence
  Description of Artificial Sequence: Synthetic oligonucleotide
ggcuaagggggacacuggc

SEQ ID NO: 7252 - RNA, 19 nt, Artificial Sequence
  Description of Artificial Sequence: Synthetic oligonucleotide
aggcuaagggggacacugg

SEQ ID NO: 7253 - RNA, 19 nt, Artificial Sequence
  Description of Artificial Sequence: Synthetic oligonucleotide
caggcuaagggggacacug

SEQ ID NO: 7254 - RNA, 19 nt, Artificial Sequence
  Description of Artificial Sequence: Synthetic oligonucleotide
gcaggcuaagggggacacu

SEQ ID NO: 7255 - RNA, 19 nt, Artificial Sequence
  Description of Artificial Sequence: Synthetic oligonucleotide
ugcaggcuaagggggacac

SEQ ID NO: 7256 - RNA, 19 nt, Artificial Sequence
  Description of Artificial Sequence: Synthetic oligonucleotide
cugcaggcuaagggggaca

SEQ ID NO: 7257 - RNA, 19 nt, Artificial Sequence
  Description of Artificial Sequence: Synthetic oligonucleotide
ccugcaggcuaagggggac

SEQ ID NO: 7258 - RNA, 19 nt, Artificial Sequence
  Description of Artificial Sequence: Synthetic oligonucleotide
accugcaggcuaaggggga

SEQ ID NO: 7259 - RNA, 19 nt, Artificial Sequence
  Description of Artificial Sequence: Synthetic oligonucleotide
caccugcaggcuaaggggg

SEQ ID NO: 7260 - RNA, 19 nt, Artificial Sequence
  Description of Artificial Sequence: Synthetic oligonucleotide
ccaccugcaggcuaagggg

SEQ ID NO: 7261 - RNA, 19 nt, Artificial Sequence
  Description of Artificial Sequence: Synthetic oligonucleotide
cccaccugcaggcuaaggg

SEQ ID NO: 7262 - RNA, 19 nt, Artificial Sequence
  Description of Artificial Sequence: Synthetic oligonucleotide
ccccaccugcaggcuaagg

SEQ ID NO: 7263 - RNA, 19 nt, Artificial Sequence
  Description of Artificial Sequence: Synthetic oligonucleotide
cccccaccugcaggcuaag

SEQ ID NO: 7264 - RNA, 19 nt, Artificial Sequence
  Description of Artificial Sequence: Synthetic oligonucleotide
ccccccaccugcaggcuaa

SEQ ID NO: 7265 - RNA, 19 nt, Artificial Sequence
  Description of Artificial Sequence: Synthetic oligonucleotide
accccccaccugcaggcua

SEQ ID NO: 7266 - RNA, 19 nt, Artificial Sequence
  Description of Artificial Sequence: Synthetic oligonucleotide
caccccccaccugcaggcu

SEQ ID NO: 7267 - RNA, 19 nt, Artificial Sequence
  Description of Artificial Sequence: Synthetic oligonucleotide
gcaccccccaccugcaggc

SEQ ID NO: 7268 - RNA, 19 nt, Artificial Sequence
  Description of Artificial Sequence: Synthetic oligonucleotide
ggcaccccccaccugcagg

SEQ ID NO: 7269 - RNA, 19 nt, Artificial Sequence
  Description of Artificial Sequence: Synthetic oligonucleotide
gggcaccccccaccugcag

SEQ ID NO: 7270 - RNA, 19 nt, Artificial Sequence
  Description of Artificial Sequence: Synthetic oligonucleotide
ugggcaccccccaccugca

SEQ ID NO: 7271 - RNA, 19 nt, Artificial Sequence
  Description of Artificial Sequence: Synthetic oligonucleotide
cugggcaccccccaccugc

SEQ ID NO: 7272 - RNA, 19 nt, Artificial Sequence
  Description of Artificial Sequence: Synthetic oligonucleotide
ccugggcaccccccaccug

SEQ ID NO: 7273 - RNA, 19 nt, Artificial Sequence
  Description of Artificial Sequence: Synthetic oligonucleotide
accugggcaccccccaccu

SEQ ID NO: 7274 - RNA, 19 nt, Artificial Sequence
  Description of Artificial Sequence: Synthetic oligonucleotide
uaccugggcaccccccacc

SEQ ID NO: 7275 - RNA, 19 nt, Artificial Sequence
  Description of Artificial Sequence: Synthetic oligonucleotide
guaccugggcaccccccac

SEQ ID NO: 7276 - RNA, 19 nt, Artificial Sequence
  Description of Artificial Sequence: Synthetic oligonucleotide
gguaccugggcacccccca

SEQ ID NO: 7277 - RNA, 19 nt, Artificial Sequence
  Description of Artificial Sequence: Synthetic oligonucleotide
agguaccugggcacccccc

SEQ ID NO: 7278 - RNA, 19 nt, Artificial Sequence
  Description of Artificial Sequence: Synthetic oligonucleotide
cagguaccugggcaccccc

SEQ ID NO: 7279 - RNA, 19 nt, Artificial Sequence
  Description of Artificial Sequence: Synthetic oligonucleotide
ccagguaccugggcacccc

SEQ ID NO: 7280 - RNA, 19 nt, Artificial Sequence
  Description of Artificial Sequence: Synthetic oligonucleotide
accagguaccugggcaccc

SEQ ID NO: 7281 - RNA, 19 nt, Artificial Sequence
  Description of Artificial Sequence: Synthetic oligonucleotide
aaccagguaccugggcacc

SEQ ID NO: 7282 - RNA, 19 nt, Artificial Sequence
  Description of Artificial Sequence: Synthetic oligonucleotide
gaaccagguaccugggcac

SEQ ID NO: 7283 - RNA, 19 nt, Artificial Sequence
  Description of Artificial Sequence: Synthetic oligonucleotide
ggaaccagguaccugggca

SEQ ID NO: 7284 - RNA, 19 nt, Artificial Sequence
  Description of Artificial Sequence: Synthetic oligonucleotide
aggaaccagguaccugggc

SEQ ID NO: 7285 - RNA, 19 nt, Artificial Sequence
  Description of Artificial Sequence: Synthetic oligonucleotide
caggaaccagguaccuggg

SEQ ID NO: 7286 - RNA, 19 nt, Artificial Sequence
  Description of Artificial Sequence: Synthetic oligonucleotide
ccaggaaccagguaccugg

SEQ ID NO: 7287 - RNA, 19 nt, Artificial Sequence
  Description of Artificial Sequence: Synthetic oligonucleotide
uccaggaaccagguaccug

SEQ ID NO: 7288 - RNA, 19 nt, Artificial Sequence
  Description of Artificial Sequence: Synthetic oligonucleotide
guccaggaaccagguaccu

SEQ ID NO: 7289 - RNA, 19 nt, Artificial Sequence
  Description of Artificial Sequence: Synthetic oligonucleotide
gguccaggaaccagguacc

SEQ ID NO: 7290 - RNA, 19 nt, Artificial Sequence
  Description of Artificial Sequence: Synthetic oligonucleotide
agguccaggaaccagguac

SEQ ID NO: 7291 - RNA, 19 nt, Artificial Sequence
  Description of Artificial Sequence: Synthetic oligonucleotide
aagguccaggaaccaggua

SEQ ID NO: 7292 - RNA, 19 nt, Artificial Sequence
  Description of Artificial Sequence: Synthetic oligonucleotide
gaagguccaggaaccaggu

SEQ ID NO: 7293 - RNA, 19 nt, Artificial Sequence
  Description of Artificial Sequence: Synthetic oligonucleotide
ggaagguccaggaaccagg

SEQ ID NO: 7294 - RNA, 19 nt, Artificial Sequence
  Description of Artificial Sequence: Synthetic oligonucleotide
uggaagguccaggaaccag

SEQ ID NO: 7295 - RNA, 19 nt, Artificial Sequence
  Description of Artificial Sequence: Synthetic oligonucleotide
cuggaagguccaggaacca

SEQ ID NO: 7296 - RNA, 19 nt, Artificial Sequence
  Description of Artificial Sequence: Synthetic oligonucleotide
acuggaagguccaggaacc

SEQ ID NO: 7297 - RNA, 19 nt, Artificial Sequence
  Description of Artificial Sequence: Synthetic oligonucleotide
uacuggaagguccaggaac

SEQ ID NO: 7298 - RNA, 19 nt, Artificial Sequence
  Description of Artificial Sequence: Synthetic oligonucleotide
guacuggaagguccaggaa

SEQ ID NO: 7299 - RNA, 19 nt, Artificial Sequence
  Description of Artificial Sequence: Synthetic oligonucleotide
uguacuggaagguccagga

SEQ ID NO: 7300 - RNA, 19 nt, Artificial Sequence
  Description of Artificial Sequence: Synthetic oligonucleotide
cuguacuggaagguccagg

SEQ ID NO: 7301 - RNA, 19 nt, Artificial Sequence
  Description of Artificial Sequence: Synthetic oligonucleotide
ucuguacuggaagguccag

SEQ ID NO: 7302 - RNA, 19 nt, Artificial Sequence
  Description of Artificial Sequence: Synthetic oligonucleotide
cucuguacuggaaggucca

SEQ ID NO: 7303 - RNA, 19 nt, Artificial Sequence
  Description of Artificial Sequence: Synthetic oligonucleotide
ucucuguacuggaaggucc

SEQ ID NO: 7304 - RNA, 19 nt, Artificial Sequence
  Description of Artificial Sequence: Synthetic oligonucleotide
uucucuguacuggaagguc

SEQ ID NO: 7305 - RNA, 19 nt, Artificial Sequence
  Description of Artificial Sequence: Synthetic oligonucleotide
cuucucuguacuggaaggu

SEQ ID NO: 7306 - RNA, 19 nt, Artificial Sequence
  Description of Artificial Sequence: Synthetic oligonucleotide
ucuucucuguacuggaagg

SEQ ID NO: 7307 - RNA, 19 nt, Artificial Sequence
  Description of Artificial Sequence: Synthetic oligonucleotide
gucuucucuguacuggaag

SEQ ID NO: 7308 - RNA, 19 nt, Artificial Sequence
  Description of Artificial Sequence: Synthetic oligonucleotide
ggucuucucuguacuggaa

SEQ ID NO: 7309 - RNA, 19 nt, Artificial Sequence
  Description of Artificial Sequence: Synthetic oligonucleotide
gggucuucucuguacugga

SEQ ID NO: 7310 - RNA, 19 nt, Artificial Sequence
  Description of Artificial Sequence: Synthetic oligonucleotide
agggucuucucuguacugg

SEQ ID NO: 7311 - RNA, 19 nt, Artificial Sequence
  Description of Artificial Sequence: Synthetic oligonucleotide
cagggucuucucuguacug

SEQ ID NO: 7312 - RNA, 19 nt, Artificial Sequence
  Description of Artificial Sequence: Synthetic oligonucleotide
acagggucuucucuguacu

SEQ ID NO: 7313 - RNA, 19 nt, Artificial Sequence
  Description of Artificial Sequence: Synthetic oligonucleotide
gacagggucuucucuguac

SEQ ID NO: 7314 - RNA, 19 nt, Artificial Sequence
  Description of Artificial Sequence: Synthetic oligonucleotide
cgacagggucuucucugua

SEQ ID NO: 7315 - RNA, 19 nt, Artificial Sequence
  Description of Artificial Sequence: Synthetic oligonucleotide
acgacagggucuucucugu

SEQ ID NO: 7316 - RNA, 19 nt, Artificial Sequence
  Description of Artificial Sequence: Synthetic oligonucleotide
cacgacagggucuucucug

SEQ ID NO: 7317 - RNA, 19 nt, Artificial Sequence
  Description of Artificial Sequence: Synthetic oligonucleotide
gcacgacagggucuucucu

SEQ ID NO: 7318 - RNA, 19 nt, Artificial Sequence
  Description of Artificial Sequence: Synthetic oligonucleotide
agcacgacagggucuucuc

SEQ ID NO: 7319 - RNA, 19 nt, Artificial Sequence
  Description of Artificial Sequence: Synthetic oligonucleotide
uagcacgacagggucuucu

SEQ ID NO: 7320 - RNA, 19 nt, Artificial Sequence
  Description of Artificial Sequence: Synthetic oligonucleotide
uuagcacgacagggucuuc

SEQ ID NO: 7321 - RNA, 19 nt, Artificial Sequence
  Description of Artificial Sequence: Synthetic oligonucleotide
cuuagcacgacagggucuu

SEQ ID NO: 7322 - RNA, 19 nt, Artificial Sequence
  Description of Artificial Sequence: Synthetic oligonucleotide
gcuuagcacgacagggucu

SEQ ID NO: 7323 - RNA, 19 nt, Artificial Sequence
  Description of Artificial Sequence: Synthetic oligonucleotide
ugcuuagcacgacaggguc

SEQ ID NO: 7324 - RNA, 19 nt, Artificial Sequence
  Description of Artificial Sequence: Synthetic oligonucleotide
augcuuagcacgacagggu

SEQ ID NO: 7325 - RNA, 19 nt, Artificial Sequence
  Description of Artificial Sequence: Synthetic oligonucleotide
gaugcuuagcacgacaggg

SEQ ID NO: 7326 - RNA, 19 nt, Artificial Sequence
  Description of Artificial Sequence: Synthetic oligonucleotide
ugaugcuuagcacgacagg

SEQ ID NO: 7327 - RNA, 19 nt, Artificial Sequence
  Description of Artificial Sequence: Synthetic oligonucleotide
cugaugcuuagcacgacag

SEQ ID NO: 7328 - RNA, 19 nt, Artificial Sequence
  Description of Artificial Sequence: Synthetic oligonucleotide
gcugaugcuuagcacgaca

SEQ ID NO: 7329 - RNA, 19 nt, Artificial Sequence
  Description of Artificial Sequence: Synthetic oligonucleotide
ggcugaugcuuagcacgac

SEQ ID NO: 7330 - RNA, 19 nt, Artificial Sequence
  Description of Artificial Sequence: Synthetic oligonucleotide
gggcugaugcuuagcacga

SEQ ID NO: 7331 - RNA, 19 nt, Artificial Sequence
  Description of Artificial Sequence: Synthetic oligonucleotide
ggggcugaugcuuagcacg

SEQ ID NO: 7332 - RNA, 19 nt, Artificial Sequence
  Description of Artificial Sequence: Synthetic oligonucleotide
uggggcugaugcuuagcac

SEQ ID NO: 7333 - RNA, 19 nt, Artificial Sequence
  Description of Artificial Sequence: Synthetic oligonucleotide
uuggggcugaugcuuagca

SEQ ID NO: 7334 - RNA, 19 nt, Artificial Sequence
  Description of Artificial Sequence: Synthetic oligonucleotide
guuggggcugaugcuuagc

SEQ ID NO: 7335 - RNA, 19 nt, Artificial Sequence
  Description of Artificial Sequence: Synthetic oligonucleotide
aguuggggcugaugcuuag

SEQ ID NO: 7336 - RNA, 19 nt, Artificial Sequence
  Description of Artificial Sequence: Synthetic oligonucleotide
caguuggggcugaugcuua

SEQ ID NO: 7337 - RNA, 19 nt, Artificial Sequence
  Description of Artificial Sequence: Synthetic oligonucleotide
acaguuggggcugaugcuu

SEQ ID NO: 7338 - RNA, 19 nt, Artificial Sequence
  Description of Artificial Sequence: Synthetic oligonucleotide
cacaguuggggcugaugcu

SEQ ID NO: 7339 - RNA, 19 nt, Artificial Sequence
  Description of Artificial Sequence: Synthetic oligonucleotide
ccacaguuggggcugaugc

SEQ ID NO: 7340 - RNA, 19 nt, Artificial Sequence
  Description of Artificial Sequence: Synthetic oligonucleotide
gccacaguuggggcugaug

SEQ ID NO: 7341 - RNA, 19 nt, Artificial Sequence
  Description of Artificial Sequence: Synthetic oligonucleotide
agccacaguuggggcugau

SEQ ID NO: 7342 - RNA, 19 nt, Artificial Sequence
  Description of Artificial Sequence: Synthetic oligonucleotide
uagccacaguuggggcuga

SEQ ID NO: 7343 - RNA, 19 nt, Artificial Sequence
  Description of Artificial Sequence: Synthetic oligonucleotide
guagccacaguuggggcug

SEQ ID NO: 7344 - RNA, 19 nt, Artificial Sequence
  Description of Artificial Sequence: Synthetic oligonucleotide
uguagccacaguuggggcu

SEQ ID NO: 7345 - RNA, 19 nt, Artificial Sequence
  Description of Artificial Sequence: Synthetic oligonucleotide
auguagccacaguuggggc

SEQ ID NO: 7346 - RNA, 19 nt, Artificial Sequence
  Description of Artificial Sequence: Synthetic oligonucleotide
gauguagccacaguugggg

SEQ ID NO: 7347 - RNA, 19 nt, Artificial Sequence
  Description of Artificial Sequence: Synthetic oligonucleotide
ugauguagccacaguuggg

SEQ ID NO: 7348 - RNA, 19 nt, Artificial Sequence
  Description of Artificial Sequence: Synthetic oligonucleotide
uugauguagccacaguugg

SEQ ID NO: 7349 - RNA, 19 nt, Artificial Sequence
  Description of Artificial Sequence: Synthetic oligonucleotide
guugauguagccacaguug

SEQ ID NO: 7350 - RNA, 19 nt, Artificial Sequence
  Description of Artificial Sequence: Synthetic oligonucleotide
aguugauguagccacaguu

SEQ ID NO: 7351 - RNA, 19 nt, Artificial Sequence
  Description of Artificial Sequence: Synthetic oligonucleotide
gaguugauguagccacagu

SEQ ID NO: 7352 - RNA, 19 nt, Artificial Sequence
  Description of Artificial Sequence: Synthetic oligonucleotide
ggaguugauguagccacag

SEQ ID NO: 7353 - RNA, 19 nt, Artificial Sequence
  Description of Artificial Sequence: Synthetic oligonucleotide
gggaguugauguagccaca

SEQ ID NO: 7354 - RNA, 19 nt, Artificial Sequence
  Description of Artificial Sequence: Synthetic oligonucleotide
ugggaguugauguagccac

SEQ ID NO: 7355 - RNA, 19 nt, Artificial Sequence
  Description of Artificial Sequence: Synthetic oligonucleotide
gugggaguugauguagcca

SEQ ID NO: 7356 - RNA, 19 nt, Artificial Sequence
  Description of Artificial Sequence: Synthetic oligonucleotide
ugugggaguugauguagcc

SEQ ID NO: 7357 - RNA, 19 nt, Artificial Sequence
  Description of Artificial Sequence: Synthetic oligonucleotide
augugggaguugauguagc

SEQ ID NO: 7358 - RNA, 19 nt, Artificial Sequence
  Description of Artificial Sequence: Synthetic oligonucleotide
gaugugggaguugauguag

SEQ ID NO: 7359 - RNA, 19 nt, Artificial Sequence
  Description of Artificial Sequence: Synthetic oligonucleotide
ugaugugggaguugaugua

SEQ ID NO: 7360 - RNA, 19 nt, Artificial Sequence
  Description of Artificial Sequence: Synthetic oligonucleotide
gugaugugggaguugaugu

SEQ ID NO: 7361 - RNA, 19 nt, Artificial Sequence
  Description of Artificial Sequence: Synthetic oligonucleotide
ggugaugugggaguugaug

SEQ ID NO: 7362 - RNA, 19 nt, Artificial Sequence
  Description of Artificial Sequence: Synthetic oligonucleotide
uggugaugugggaguugau

SEQ ID NO: 7363 - RNA, 19 nt, Artificial Sequence
  Description of Artificial Sequence: Synthetic oligonucleotide
auggugaugugggaguuga

SEQ ID NO: 7364 - RNA, 19 nt, Artificial Sequence
  Description of Artificial Sequence: Synthetic oligonucleotide
gauggugaugugggaguug

SEQ ID NO: 7365 - RNA, 19 nt, Artificial Sequence
  Description of Artificial Sequence: Synthetic oligonucleotide
agauggugaugugggaguu

SEQ ID NO: 7366 - RNA, 19 nt, Artificial Sequence
  Description of Artificial Sequence: Synthetic oligonucleotide
cagauggugaugugggagu

SEQ ID NO: 7367 - RNA, 19 nt, Artificial Sequence
  Description of Artificial Sequence: Synthetic oligonucleotide
acagauggugaugugggag

SEQ ID NO: 7368 - RNA, 19 nt, Artificial Sequence
  Description of Artificial Sequence: Synthetic oligonucleotide
cacagauggugauguggga

SEQ ID NO: 7369 - RNA, 19 nt, Artificial Sequence
  Description of Artificial Sequence: Synthetic oligonucleotide
ccacagauggugauguggg

SEQ ID NO: 7370 - RNA, 19 nt, Artificial Sequence
  Description of Artificial Sequence: Synthetic oligonucleotide
gccacagauggugaugugg

SEQ ID NO: 7371 - RNA, 19 nt, Artificial Sequence
  Description of Artificial Sequence: Synthetic oligonucleotide
ggccacagauggugaugug

SEQ ID NO: 7372 - RNA, 19 nt, Artificial Sequence
  Description of Artificial Sequence: Synthetic oligonucleotide
uggccacagauggugaugu

SEQ ID NO: 7373 - RNA, 19 nt, Artificial Sequence
  Description of Artificial Sequence: Synthetic oligonucleotide
cuggccacagauggugaug

SEQ ID NO: 7374 - RNA, 19 nt, Artificial Sequence
  Description of Artificial Sequence: Synthetic oligonucleotide
gcuggccacagauggugau

SEQ ID NO: 7375 - RNA, 19 nt, Artificial Sequence
  Description of Artificial Sequence: Synthetic oligonucleotide
ugcuggccacagaugguga

SEQ ID NO: 7376 - RNA, 19 nt, Artificial Sequence
  Description of Artificial Sequence: Synthetic oligonucleotide
augcuggccacagauggug

SEQ ID NO: 7377 - RNA, 19 nt, Artificial Sequence
  Description of Artificial Sequence: Synthetic oligonucleotide
gaugcuggccacagauggu

SEQ ID NO: 7378 - RNA, 19 nt, Artificial Sequence
  Description of Artificial Sequence: Synthetic oligonucleotide
agaugcuggccacagaugg

SEQ ID NO: 7379 - RNA, 19 nt, Artificial Sequence
  Description of Artificial Sequence: Synthetic oligonucleotide
uagaugcuggccacagaug

SEQ ID NO: 7380 - RNA, 19 nt, Artificial Sequence
  Description of Artificial Sequence: Synthetic oligonucleotide
uuagaugcuggccacagau

SEQ ID NO: 7381 - RNA, 19 nt, Artificial Sequence
  Description of Artificial Sequence: Synthetic oligonucleotide
guuagaugcuggccacaga

SEQ ID NO: 7382 - RNA, 19 nt, Artificial Sequence
  Description of Artificial Sequence: Synthetic oligonucleotide
aguuagaugcuggccacag

SEQ ID NO: 7383 - RNA, 19 nt, Artificial Sequence
  Description of Artificial Sequence: Synthetic oligonucleotide
aaguuagaugcuggccaca

SEQ ID NO: 7384 - RNA, 19 nt, Artificial Sequence
  Description of Artificial Sequence: Synthetic oligonucleotide
gaaguuagaugcuggccac

SEQ ID NO: 7385 - RNA, 19 nt, Artificial Sequence
  Description of Artificial Sequence: Synthetic oligonucleotide
ugaaguuagaugcuggcca

SEQ ID NO: 7386 - RNA, 19 nt, Artificial Sequence
  Description of Artificial Sequence: Synthetic oligonucleotide
cugaaguuagaugcuggcc

SEQ ID NO: 7387 - RNA, 19 nt, Artificial Sequence
  Description of Artificial Sequence: Synthetic oligonucleotide
gcugaaguuagaugcuggc

SEQ ID NO: 7388 - RNA, 19 nt, Artificial Sequence
  Description of Artificial Sequence: Synthetic oligonucleotide
ugcugaaguuagaugcugg

SEQ ID NO: 7389 - RNA, 19 nt, Artificial Sequence
  Description of Artificial Sequence: Synthetic oligonucleotide
augcugaaguuagaugcug

SEQ ID NO: 7390 - RNA, 19 nt, Artificial Sequence
  Description of Artificial Sequence: Synthetic oligonucleotide
caugcugaaguuagaugcu

SEQ ID NO: 7391 - RNA, 19 nt, Artificial Sequence
  Description of Artificial Sequence: Synthetic oligonucleotide
ccaugcugaaguuagaugc

SEQ ID NO: 7392 - RNA, 19 nt, Artificial Sequence
  Description of Artificial Sequence: Synthetic oligonucleotide
gccaugcugaaguuagaug

SEQ ID NO: 7393 - RNA, 19 nt, Artificial Sequence
  Description of Artificial Sequence: Synthetic oligonucleotide
ugccaugcugaaguuagau

SEQ ID NO: 7394 - RNA, 19 nt, Artificial Sequence
  Description of Artificial Sequence: Synthetic oligonucleotide
gugccaugcugaaguuaga

SEQ ID NO: 7395 - RNA, 19 nt, Artificial Sequence
  Description of Artificial Sequence: Synthetic oligonucleotide
agugccaugcugaaguuag

SEQ ID NO: 7396 - RNA, 19 nt, Artificial Sequence
  Description of Artificial Sequence: Synthetic oligonucleotide
aagugccaugcugaaguua

SEQ ID NO: 7397 - RNA, 19 nt, Artificial Sequence
  Description of Artificial Sequence: Synthetic oligonucleotide
uaagugccaugcugaaguu

SEQ ID NO: 7398 - RNA, 19 nt, Artificial Sequence
  Description of Artificial Sequence: Synthetic oligonucleotide
cuaagugccaugcugaagu

SEQ ID NO: 7399 - RNA, 19 nt, Artificial Sequence
  Description of Artificial Sequence: Synthetic oligonucleotide
acuaagugccaugcugaag

SEQ ID NO: 7400 - RNA, 19 nt, Artificial Sequence
  Description of Artificial Sequence: Synthetic oligonucleotide
cacuaagugccaugcugaa

SEQ ID NO: 7401 - RNA, 19 nt, Artificial Sequence
  Description of Artificial Sequence: Synthetic oligonucleotide
gcacuaagugccaugcuga

SEQ ID NO: 7402 - RNA, 19 nt, Artificial Sequence
  Description of Artificial Sequence: Synthetic oligonucleotide
agcacuaagugccaugcug

SEQ ID NO: 7403 - RNA, 19 nt, Artificial Sequence
  Description of Artificial Sequence: Synthetic oligonucleotide
cagcacuaagugccaugcu

SEQ ID NO: 7404 - RNA, 19 nt, Artificial Sequence
  Description of Artificial Sequence: Synthetic oligonucleotide
acagcacuaagugccaugc

SEQ ID NO: 7405 - RNA, 19 nt, Artificial Sequence
  Description of Artificial Sequence: Synthetic oligonucleotide
gacagcacuaagugccaug

SEQ ID NO: 7406 - RNA, 19 nt, Artificial Sequence
  Description of Artificial Sequence: Synthetic oligonucleotide
ugacagcacuaagugccau

SEQ ID NO: 7407 - RNA, 19 nt, Artificial Sequence
  Description of Artificial Sequence: Synthetic oligonucleotide
augacagcacuaagugcca

SEQ ID NO: 7408 - RNA, 19 nt, Artificial Sequence
  Description of Artificial Sequence: Synthetic oligonucleotide
aaugacagcacuaagugcc

SEQ ID NO: 7409 - RNA, 19 nt, Artificial Sequence
  Description of Artificial Sequence: Synthetic oligonucleotide
gaaugacagcacuaagugc

SEQ ID NO: 7410 - RNA, 19 nt, Artificial Sequence
  Description of Artificial Sequence: Synthetic oligonucleotide
ggaaugacagcacuaagug

SEQ ID NO: 7411 - RNA, 19 nt, Artificial Sequence
  Description of Artificial Sequence: Synthetic oligonucleotide
uggaaugacagcacuaagu

SEQ ID NO: 7412 - RNA, 19 nt, Artificial Sequence
  Description of Artificial Sequence: Synthetic oligonucleotide
auggaaugacagcacuaag

SEQ ID NO: 7413 - RNA, 19 nt, Artificial Sequence
  Description of Artificial Sequence: Synthetic oligonucleotide
cauggaaugacagcacuaa

SEQ ID NO: 7414 - RNA, 19 nt, Artificial Sequence
  Description of Artificial Sequence: Synthetic oligonucleotide
ucauggaaugacagcacua

SEQ ID NO: 7415 - RNA, 19 nt, Artificial Sequence
  Description of Artificial Sequence: Synthetic oligonucleotide
gucauggaaugacagcacu

SEQ ID NO: 7416 - RNA, 19 nt, Artificial Sequence
  Description of Artificial Sequence: Synthetic oligonucleotide
cgucauggaaugacagcac

SEQ ID NO: 7417 - RNA, 19 nt, Artificial Sequence
  Description of Artificial Sequence: Synthetic oligonucleotide
ccgucauggaaugacagca

SEQ ID NO: 7418 - RNA, 19 nt, Artificial Sequence
  Description of Artificial Sequence: Synthetic oligonucleotide
cccgucauggaaugacagc

SEQ ID NO: 7419 - RNA, 19 nt, Artificial Sequence
  Description of Artificial Sequence: Synthetic oligonucleotide
gcccgucauggaaugacag

SEQ ID NO: 7420 - RNA, 19 nt, Artificial Sequence
  Description of Artificial Sequence: Synthetic oligonucleotide
agcccgucauggaaugaca

SEQ ID NO: 7421 - RNA, 19 nt, Artificial Sequence
  Description of Artificial Sequence: Synthetic oligonucleotide
aagcccgucauggaaugac

SEQ ID NO: 7422 - RNA, 19 nt, Artificial Sequence
  Description of Artificial Sequence: Synthetic oligonucleotide
uaagcccgucauggaauga

SEQ ID NO: 7423 - RNA, 19 nt, Artificial Sequence
  Description of Artificial Sequence: Synthetic oligonucleotide
cuaagcccgucauggaaug

SEQ ID NO: 7424 - RNA, 19 nt, Artificial Sequence
  Description of Artificial Sequence: Synthetic oligonucleotide
ccuaagcccgucauggaau

SEQ ID NO: 7425 - RNA, 19 nt, Artificial Sequence
  Description of Artificial Sequence: Synthetic oligonucleotide
cccuaagcccgucauggaa

SEQ ID NO: 7426 - RNA, 19 nt, Artificial Sequence
  Description of Artificial Sequence: Synthetic oligonucleotide
gcccuaagcccgucaugga

SEQ ID NO: 7427 - RNA, 19 nt, Artificial Sequence
  Description of Artificial Sequence: Synthetic oligonucleotide
ugcccuaagcccgucaugg

SEQ ID NO: 7428 - RNA, 19 nt, Artificial Sequence
  Description of Artificial Sequence: Synthetic oligonucleotide
cugcccuaagcccgucaug

SEQ ID NO: 7429 - RNA, 19 nt, Artificial Sequence
  Description of Artificial Sequence: Synthetic oligonucleotide
acugcccuaagcccgucau

SEQ ID NO: 7430 - RNA, 19 nt, Artificial Sequence
  Description of Artificial Sequence: Synthetic oligonucleotide
cacugcccuaagcccguca

SEQ ID NO: 7431 - RNA, 19 nt, Artificial Sequence
  Description of Artificial Sequence: Synthetic oligonucleotide
ccacugcccuaagcccguc

SEQ ID NO: 7432 - RNA, 19 nt, Artificial Sequence
  Description of Artificial Sequence: Synthetic oligonucleotide
uccacugcccuaagcccgu

SEQ ID NO: 7433 - RNA, 19 nt, Artificial Sequence
  Description of Artificial Sequence: Synthetic oligonucleotide
uuccacugcccuaagcccg

SEQ ID NO: 7434 - RNA, 19 nt, Artificial Sequence
  Description of Artificial Sequence: Synthetic oligonucleotide
uuuccacugcccuaagccc

SEQ ID NO: 7435 - RNA, 19 nt, Artificial Sequence
  Description of Artificial Sequence: Synthetic oligonucleotide
cuuuccacugcccuaagcc

SEQ ID NO: 7436 - RNA, 19 nt, Artificial Sequence
  Description of Artificial Sequence: Synthetic oligonucleotide
gcuuuccacugcccuaagc

SEQ ID NO: 7437 - RNA, 19 nt, Artificial Sequence
  Description of Artificial Sequence: Synthetic oligonucleotide
ugcuuuccacugcccuaag

SEQ ID NO: 7438 - RNA, 19 nt, Artificial Sequence
  Description of Artificial Sequence: Synthetic oligonucleotide
cugcuuuccacugcccuaa

SEQ ID NO: 7439 - RNA, 19 nt, Artificial Sequence
  Description of Artificial Sequence: Synthetic oligonucleotide
ccugcuuuccacugcccua

SEQ ID NO: 7440 - RNA, 19 nt, Artificial Sequence
  Description of Artificial Sequence: Synthetic oligonucleotide
accugcuuuccacugcccu

SEQ ID NO: 7441 - RNA, 19 nt, Artificial Sequence
  Description of Artificial Sequence: Synthetic oligonucleotide
caccugcuuuccacugccc

SEQ ID NO: 7442 - RNA, 19 nt, Artificial Sequence
  Description of Artificial Sequence: Synthetic oligonucleotide
acaccugcuuuccacugcc

SEQ ID NO: 7443 - RNA, 19 nt, Artificial Sequence
  Description of Artificial Sequence: Synthetic oligonucleotide
cacaccugcuuuccacugc

SEQ ID NO: 7444 - RNA, 19 nt, Artificial Sequence
  Description of Artificial Sequence: Synthetic oligonucleotide
ucacaccugcuuuccacug

SEQ ID NO: 7445 - RNA, 19 nt, Artificial Sequence
  Description of Artificial Sequence: Synthetic oligonucleotide
cucacaccugcuuuccacu

SEQ ID NO: 7446 - RNA, 19 nt, Artificial Sequence
  Description of Artificial Sequence: Synthetic oligonucleotide
ucucacaccugcuuuccac

SEQ ID NO: 7447 - RNA, 19 nt, Artificial Sequence
  Description of Artificial Sequence: Synthetic oligonucleotide
cucucacaccugcuuucca

SEQ ID NO: 7448 - RNA, 19 nt, Artificial Sequence
  Description of Artificial Sequence: Synthetic oligonucleotide
ccucucacaccugcuuucc

SEQ ID NO: 7449 - RNA, 19 nt, Artificial Sequence
  Description of Artificial Sequence: Synthetic oligonucleotide
gccucucacaccugcuuuc

SEQ ID NO: 7450 - RNA, 19 nt, Artificial Sequence
  Description of Artificial Sequence: Synthetic oligonucleotide
ugccucucacaccugcuuu

SEQ ID NO: 7451 - RNA, 19 nt, Artificial Sequence
  Description of Artificial Sequence: Synthetic oligonucleotide
cugccucucacaccugcuu

SEQ ID NO: 7452 - RNA, 19 nt, Artificial Sequence
  Description of Artificial Sequence: Synthetic oligonucleotide
gcugccucucacaccugcu

SEQ ID NO: 7453 - RNA, 19 nt, Artificial Sequence
  Description of Artificial Sequence: Synthetic oligonucleotide
agcugccucucacaccugc

SEQ ID NO: 7454 - RNA, 19 nt, Artificial Sequence
  Description of Artificial Sequence: Synthetic oligonucleotide
aagcugccucucacaccug

SEQ ID NO: 7455 - RNA, 19 nt, Artificial Sequence
  Description of Artificial Sequence: Synthetic oligonucleotide
gaagcugccucucacaccu

SEQ ID NO: 7456 - RNA, 19 nt, Artificial Sequence
  Description of Artificial Sequence: Synthetic oligonucleotide
ggaagcugccucucacacc

SEQ ID NO: 7457 - RNA, 19 nt, Artificial Sequence
  Description of Artificial Sequence: Synthetic oligonucleotide
uggaagcugccucucacac

SEQ ID NO: 7458 - RNA, 19 nt, Artificial Sequence
  Description of Artificial Sequence: Synthetic oligonucleotide
cuggaagcugccucucaca

SEQ ID NO: 7459 - RNA, 19 nt, Artificial Sequence
  Description of Artificial Sequence: Synthetic oligonucleotide
ucuggaagcugccucucac

SEQ ID NO: 7460 - RNA, 19 nt, Artificial Sequence
  Description of Artificial Sequence: Synthetic oligonucleotide
cucuggaagcugccucuca

SEQ ID NO: 7461 - RNA, 19 nt, Artificial Sequence
  Description of Artificial Sequence: Synthetic oligonucleotide
gcucuggaagcugccucuc

SEQ ID NO: 7462 - RNA, 19 nt, Artificial Sequence
  Description of Artificial Sequence: Synthetic oligonucleotide
ugcucuggaagcugccucu

SEQ ID NO: 7463 - RNA, 19 nt, Artificial Sequence
  Description of Artificial Sequence: Synthetic oligonucleotide
cugcucuggaagcugccuc

SEQ ID NO: 7464 - RNA, 19 nt, Artificial Sequence
  Description of Artificial Sequence: Synthetic oligonucleotide
gcugcucuggaagcugccu

SEQ ID NO: 7465 - RNA, 19 nt, Artificial Sequence
  Description of Artificial Sequence: Synthetic oligonucleotide
ugcugcucuggaagcugcc

SEQ ID NO: 7466 - RNA, 19 nt, Artificial Sequence
  Description of Artificial Sequence: Synthetic oligonucleotide
cugcugcucuggaagcugc

SEQ ID NO: 7467 - RNA, 19 nt, Artificial Sequence
  Description of Artificial Sequence: Synthetic oligonucleotide
gcugcugcucuggaagcug

SEQ ID NO: 7468 - RNA, 19 nt, Artificial Sequence
  Description of Artificial Sequence: Synthetic oligonucleotide
agcugcugcucuggaagcu

SEQ ID NO: 7469 - RNA, 19 nt, Artificial Sequence
  Description of Artificial Sequence: Synthetic oligonucleotide
cagcugcugcucuggaagc

SEQ ID NO: 7470 - RNA, 19 nt, Artificial Sequence
  Description of Artificial Sequence: Synthetic oligonucleotide
acagcugcugcucuggaag

SEQ ID NO: 7471 - RNA, 19 nt, Artificial Sequence
  Description of Artificial Sequence: Synthetic oligonucleotide
cacagcugcugcucuggaa

SEQ ID NO: 7472 - RNA, 19 nt, Artificial Sequence
  Description of Artificial Sequence: Synthetic oligonucleotide
gcacagcugcugcucugga

SEQ ID NO: 7473 - RNA, 19 nt, Artificial Sequence
  Description of Artificial Sequence: Synthetic oligonucleotide
ggcacagcugcugcucugg

SEQ ID NO: 7474 - RNA, 19 nt, Artificial Sequence
  Description of Artificial Sequence: Synthetic oligonucleotide
cggcacagcugcugcucug

SEQ ID NO: 7475 - RNA, 19 nt, Artificial Sequence
  Description of Artificial Sequence: Synthetic oligonucleotide
gcggcacagcugcugcucu

SEQ ID NO: 7476 - RNA, 19 nt, Artificial Sequence
  Description of Artificial Sequence: Synthetic oligonucleotide
ggcggcacagcugcugcuc

SEQ ID NO: 7477 - RNA, 19 nt, Artificial Sequence
  Description of Artificial Sequence: Synthetic oligonucleotide
aggcggcacagcugcugcu

SEQ ID NO: 7478 - RNA, 19 nt, Artificial Sequence
  Description of Artificial Sequence: Synthetic oligonucleotide
aaggcggcacagcugcugc

SEQ ID NO: 7479 - RNA, 19 nt, Artificial Sequence
  Description of Artificial Sequence: Synthetic oligonucleotide
gaaggcggcacagcugcug

SEQ ID NO: 7480 - RNA, 19 nt, Artificial Sequence
  Description of Artificial Sequence: Synthetic oligonucleotide
ggaaggcggcacagcugcu

SEQ ID NO: 7481 - RNA, 19 nt, Artificial Sequence
  Description of Artificial Sequence: Synthetic oligonucleotide
aggaaggcggcacagcugc

SEQ ID NO: 7482 - RNA, 19 nt, Artificial Sequence
  Description of Artificial Sequence: Synthetic oligonucleotide
caggaaggcggcacagcug

SEQ ID NO: 7483 - RNA, 19 nt, Artificial Sequence
  Description of Artificial Sequence: Synthetic oligonucleotide
ucaggaaggcggcacagcu

SEQ ID NO: 7484 - RNA, 19 nt, Artificial Sequence
  Description of Artificial Sequence: Synthetic oligonucleotide
uucaggaaggcggcacagc

SEQ ID NO: 7485 - RNA, 19 nt, Artificial Sequence
  Description of Artificial Sequence: Synthetic oligonucleotide
auucaggaaggcggcacag

SEQ ID NO: 7486 - RNA, 19 nt, Artificial Sequence
  Description of Artificial Sequence: Synthetic oligonucleotide
uauucaggaaggcggcaca

SEQ ID NO: 7487 - RNA, 19 nt, Artificial Sequence
  Description of Artificial Sequence: Synthetic oligonucleotide
auauucaggaaggcggcac

SEQ ID NO: 7488 - RNA, 19 nt, Artificial Sequence
  Description of Artificial Sequence: Synthetic oligonucleotide
cauauucaggaaggcggca

SEQ ID NO: 7489 - RNA, 19 nt, Artificial Sequence
  Description of Artificial Sequence: Synthetic oligonucleotide
acauauucaggaaggcggc

SEQ ID NO: 7490 - RNA, 19 nt, Artificial Sequence
  Description of Artificial Sequence: Synthetic oligonucleotide
cacauauucaggaaggcgg

SEQ ID NO: 7491 - RNA, 19 nt, Artificial Sequence
  Description of Artificial Sequence: Synthetic oligonucleotide
ccacauauucaggaaggcg

SEQ ID NO: 7492 - RNA, 19 nt, Artificial Sequence
  Description of Artificial Sequence: Synthetic oligonucleotide
accacauauucaggaaggc

SEQ ID NO: 7493 - RNA, 19 nt, Artificial Sequence
  Description of Artificial Sequence: Synthetic oligonucleotide
gaccacauauucaggaagg

SEQ ID NO: 7494 - RNA, 19 nt, Artificial Sequence
  Description of Artificial Sequence: Synthetic oligonucleotide
ggaccacauauucaggaag

SEQ ID NO: 7495 - RNA, 19 nt, Artificial Sequence
  Description of Artificial Sequence: Synthetic oligonucleotide
cggaccacauauucaggaa

SEQ ID NO: 7496 - RNA, 19 nt, Artificial Sequence
  Description of Artificial Sequence: Synthetic oligonucleotide
ucggaccacauauucagga

SEQ ID NO: 7497 - RNA, 19 nt, Artificial Sequence
  Description of Artificial Sequence: Synthetic oligonucleotide
cucggaccacauauucagg

SEQ ID NO: 7498 - RNA, 19 nt, Artificial Sequence
  Description of Artificial Sequence: Synthetic oligonucleotide
ucucggaccacauauucag

SEQ ID NO: 7499 - RNA, 19 nt, Artificial Sequence
  Description of Artificial Sequence: Synthetic oligonucleotide
gucucggaccacauauuca

SEQ ID NO: 7500 - RNA, 19 nt, Artificial Sequence
  Description of Artificial Sequence: Synthetic oligonucleotide
ggucucggaccacauauuc

SEQ ID NO: 7501 - RNA, 19 nt, Artificial Sequence
  Description of Artificial Sequence: Synthetic oligonucleotide
gggucucggaccacauauu

SEQ ID NO: 7502 - RNA, 19 nt, Artificial Sequence
  Description of Artificial Sequence: Synthetic oligonucleotide
ggggucucggaccacauau

SEQ ID NO: 7503 - RNA, 19 nt, Artificial Sequence
  Description of Artificial Sequence: Synthetic oligonucleotide
gggggucucggaccacaua

SEQ ID NO: 7504 - RNA, 19 nt, Artificial Sequence
  Description of Artificial Sequence: Synthetic oligonucleotide
ugggggucucggaccacau

SEQ ID NO: 7505 - RNA, 19 nt, Artificial Sequence
  Description of Artificial Sequence: Synthetic oligonucleotide
cugggggucucggaccaca

SEQ ID NO: 7506 - RNA, 19 nt, Artificial Sequence
  Description of Artificial Sequence: Synthetic oligonucleotide
ccugggggucucggaccac

SEQ ID NO: 7507 - RNA, 19 nt, Artificial Sequence
  Description of Artificial Sequence: Synthetic oligonucleotide
cccugggggucucggacca

SEQ ID NO: 7508 - RNA, 19 nt, Artificial Sequence
  Description of Artificial Sequence: Synthetic oligonucleotide
ucccugggggucucggacc

SEQ ID NO: 7509 - RNA, 19 nt, Artificial Sequence
  Description of Artificial Sequence: Synthetic oligonucleotide
aucccugggggucucggac

SEQ ID NO: 7510 - RNA, 19 nt, Artificial Sequence
  Description of Artificial Sequence: Synthetic oligonucleotide
caucccugggggucucgga

SEQ ID NO: 7511 - RNA, 19 nt, Artificial Sequence
  Description of Artificial Sequence: Synthetic oligonucleotide
ccaucccugggggucucgg

SEQ ID NO: 7512 - RNA, 19 nt, Artificial Sequence
  Description of Artificial Sequence: Synthetic oligonucleotide
cccaucccugggggucucg

SEQ ID NO: 7513 - RNA, 19 nt, Artificial Sequence
  Description of Artificial Sequence: Synthetic oligonucleotide
acccaucccugggggucuc

SEQ ID NO: 7514 - RNA, 19 nt, Artificial Sequence
  Description of Artificial Sequence: Synthetic oligonucleotide
cacccaucccugggggucu

SEQ ID NO: 7515 - RNA, 19 nt, Artificial Sequence
  Description of Artificial Sequence: Synthetic oligonucleotide
ccacccaucccuggggguc

SEQ ID NO: 7516 - RNA, 19 nt, Artificial Sequence
  Description of Artificial Sequence: Synthetic oligonucleotide
gccacccaucccugggggu

SEQ ID NO: 7517 - RNA, 19 nt, Artificial Sequence
  Description of Artificial Sequence: Synthetic oligonucleotide
ugccacccaucccuggggg

SEQ ID NO: 7518 - RNA, 19 nt, Artificial Sequence
  Description of Artificial Sequence: Synthetic oligonucleotide
cugccacccaucccugggg

SEQ ID NO: 7519 - RNA, 19 nt, Artificial Sequence
  Description of Artificial Sequence: Synthetic oligonucleotide
ccugccacccaucccuggg

SEQ ID NO: 7520 - RNA, 19 nt, Artificial Sequence
  Description of Artificial Sequence: Synthetic oligonucleotide
cccugccacccaucccugg

SEQ ID NO: 7521 - RNA, 19 nt, Artificial Sequence
  Description of Artificial Sequence: Synthetic oligonucleotide
ucccugccacccaucccug

SEQ ID NO: 7522 - RNA, 19 nt, Artificial Sequence
  Description of Artificial Sequence: Synthetic oligonucleotide
uucccugccacccaucccu

SEQ ID NO: 7523 - RNA, 19 nt, Artificial Sequence
  Description of Artificial Sequence: Synthetic oligonucleotide
auucccugccacccauccc

SEQ ID NO: 7524 - RNA, 19 nt, Artificial Sequence
  Description of Artificial Sequence: Synthetic oligonucleotide
gauucccugccacccaucc

SEQ ID NO: 7525 - RNA, 19 nt, Artificial Sequence
  Description of Artificial Sequence: Synthetic oligonucleotide
agauucccugccacccauc

SEQ ID NO: 7526 - RNA, 19 nt, Artificial Sequence
  Description of Artificial Sequence: Synthetic oligonucleotide
cagauucccugccacccau

SEQ ID NO: 7527 - RNA, 19 nt, Artificial Sequence
  Description of Artificial Sequence: Synthetic oligonucleotide
ucagauucccugccaccca

SEQ ID NO: 7528 - RNA, 19 nt, Artificial Sequence
  Description of Artificial Sequence: Synthetic oligonucleotide
cucagauucccugccaccc

SEQ ID NO: 7529 - RNA, 19 nt, Artificial Sequence
  Description of Artificial Sequence: Synthetic oligonucleotide
acucagauucccugccacc

SEQ ID NO: 7530 - RNA, 19 nt, Artificial Sequence
  Description of Artificial Sequence: Synthetic oligonucleotide
cacucagauucccugccac

SEQ ID NO: 7531 - RNA, 19 nt, Artificial Sequence
  Description of Artificial Sequence: Synthetic oligonucleotide
gcacucagauucccugcca

SEQ ID NO: 7532 - RNA, 19 nt, Artificial Sequence
  Description of Artificial Sequence: Synthetic oligonucleotide
ggcacucagauucccugcc

SEQ ID NO: 7533 - RNA, 19 nt, Artificial Sequence
  Description of Artificial Sequence: Synthetic oligonucleotide
gggcacucagauucccugc

SEQ ID NO: 7534 - RNA, 19 nt, Artificial Sequence
  Description of Artificial Sequence: Synthetic oligonucleotide
cgggcacucagauucccug

SEQ ID NO: 7535 - RNA, 19 nt, Artificial Sequence
  Description of Artificial Sequence: Synthetic oligonucleotide
ucgggcacucagauucccu

SEQ ID NO: 7536 - RNA, 19 nt, Artificial Sequence
  Description of Artificial Sequence: Synthetic oligonucleotide
cucgggcacucagauuccc

SEQ ID NO: 7537 - RNA, 19 nt, Artificial Sequence
  Description of Artificial Sequence: Synthetic oligonucleotide
ccucgggcacucagauucc

SEQ ID NO: 7538 - RNA, 19 nt, Artificial Sequence
  Description of Artificial Sequence: Synthetic oligonucleotide
cccucgggcacucagauuc

SEQ ID NO: 7539 - RNA, 19 nt, Artificial Sequence
  Description of Artificial Sequence: Synthetic oligonucleotide
ccccucgggcacucagauu

SEQ ID NO: 7540 - RNA, 19 nt, Artificial Sequence
  Description of Artificial Sequence: Synthetic oligonucleotide
uccccucgggcacucagau

SEQ ID NO: 7541 - RNA, 19 nt, Artificial Sequence
  Description of Artificial Sequence: Synthetic oligonucleotide
auccccucgggcacucaga

SEQ ID NO: 7542 - RNA, 19 nt, Artificial Sequence
  Description of Artificial Sequence: Synthetic oligonucleotide
cauccccucgggcacucag

SEQ ID NO: 7543 - RNA, 19 nt, Artificial Sequence
  Description of Artificial Sequence: Synthetic oligonucleotide
ccauccccucgggcacuca

SEQ ID NO: 7544 - RNA, 19 nt, Artificial Sequence
  Description of Artificial Sequence: Synthetic oligonucleotide
uccauccccucgggcacuc

SEQ ID NO: 7545 - RNA, 19 nt, Artificial Sequence
  Description of Artificial Sequence: Synthetic oligonucleotide
cuccauccccucgggcacu

SEQ ID NO: 7546 - RNA, 19 nt, Artificial Sequence
  Description of Artificial Sequence: Synthetic oligonucleotide
gcuccauccccucgggcac

SEQ ID NO: 7547 - RNA, 19 nt, Artificial Sequence
  Description of Artificial Sequence: Synthetic oligonucleotide
agcuccauccccucgggca

SEQ ID NO: 7548 - RNA, 19 nt, Artificial Sequence
  Description of Artificial Sequence: Synthetic oligonucleotide
cagcuccauccccucgggc

SEQ ID NO: 7549 - RNA, 19 nt, Artificial Sequence
  Description of Artificial Sequence: Synthetic oligonucleotide
gcagcuccauccccucggg

SEQ ID NO: 7550 - RNA, 19 nt, Artificial Sequence
  Description of Artificial Sequence: Synthetic oligonucleotide
agcagcuccauccccucgg

SEQ ID NO: 7551 - RNA, 19 nt, Artificial Sequence
  Description of Artificial Sequence: Synthetic oligonucleotide
cagcagcuccauccccucg

SEQ ID NO: 7552 - RNA, 19 nt, Artificial Sequence
  Description of Artificial Sequence: Synthetic oligonucleotide
ccagcagcuccauccccuc

SEQ ID NO: 7553 - RNA, 19 nt, Artificial Sequence
  Description of Artificial Sequence: Synthetic oligonucleotide
gccagcagcuccauccccu

SEQ ID NO: 7554 - RNA, 19 nt, Artificial Sequence
  Description of Artificial Sequence: Synthetic oligonucleotide
agccagcagcuccaucccc

SEQ ID NO: 7555 - RNA, 19 nt, Artificial Sequence
  Description of Artificial Sequence: Synthetic oligonucleotide
aagccagcagcuccauccc

SEQ ID NO: 7556 - RNA, 19 nt, Artificial Sequence
  Description of Artificial Sequence: Synthetic oligonucleotide
aaagccagcagcuccaucc

SEQ ID NO: 7557 - RNA, 19 nt, Artificial Sequence
  Description of Artificial Sequence: Synthetic oligonucleotide
uaaagccagcagcuccauc

SEQ ID NO: 7558 - RNA, 19 nt, Artificial Sequence
  Description of Artificial Sequence: Synthetic oligonucleotide
guaaagccagcagcuccau

SEQ ID NO: 7559 - RNA, 19 nt, Artificial Sequence
  Description of Artificial Sequence: Synthetic oligonucleotide
uguaaagccagcagcucca

SEQ ID NO: 7560 - RNA, 19 nt, Artificial Sequence
  Description of Artificial Sequence: Synthetic oligonucleotide
guguaaagccagcagcucc

SEQ ID NO: 7561 - RNA, 19 nt, Artificial Sequence
  Description of Artificial Sequence: Synthetic oligonucleotide
aguguaaagccagcagcuc

SEQ ID NO: 7562 - RNA, 19 nt, Artificial Sequence
  Description of Artificial Sequence: Synthetic oligonucleotide
caguguaaagccagcagcu

SEQ ID NO: 7563 - RNA, 19 nt, Artificial Sequence
  Description of Artificial Sequence: Synthetic oligonucleotide
gcaguguaaagccagcagc

SEQ ID NO: 7564 - RNA, 19 nt, Artificial Sequence
  Description of Artificial Sequence: Synthetic oligonucleotide
ggcaguguaaagccagcag

SEQ ID NO: 7565 - RNA, 19 nt, Artificial Sequence
  Description of Artificial Sequence: Synthetic oligonucleotide
aggcaguguaaagccagca

SEQ ID NO: 7566 - RNA, 19 nt, Artificial Sequence
  Description of Artificial Sequence: Synthetic oligonucleotide
caggcaguguaaagccagc

SEQ ID NO: 7567 - RNA, 19 nt, Artificial Sequence
  Description of Artificial Sequence: Synthetic oligonucleotide
ccaggcaguguaaagccag

SEQ ID NO: 7568 - RNA, 19 nt, Artificial Sequence
  Description of Artificial Sequence: Synthetic oligonucleotide
gccaggcaguguaaagcca

SEQ ID NO: 7569 - RNA, 19 nt, Artificial Sequence
  Description of Artificial Sequence: Synthetic oligonucleotide
agccaggcaguguaaagcc

SEQ ID NO: 7570 - RNA, 19 nt, Artificial Sequence
  Description of Artificial Sequence: Synthetic oligonucleotide
aagccaggcaguguaaagc

SEQ ID NO: 7571 - RNA, 19 nt, Artificial Sequence
  Description of Artificial Sequence: Synthetic oligonucleotide
aaagccaggcaguguaaag

SEQ ID NO: 7572 - RNA, 19 nt, Artificial Sequence
  Description of Artificial Sequence: Synthetic oligonucleotide
gaaagccaggcaguguaaa

SEQ ID NO: 7573 - RNA, 19 nt, Artificial Sequence
  Description of Artificial Sequence: Synthetic oligonucleotide
cgaaagccaggcaguguaa

SEQ ID NO: 7574 - RNA, 19 nt, Artificial Sequence
  Description of Artificial Sequence: Synthetic oligonucleotide
gcgaaagccaggcagugua

SEQ ID NO: 7575 - RNA, 19 nt, Artificial Sequence
  Description of Artificial Sequence: Synthetic oligonucleotide
agcgaaagccaggcagugu

SEQ ID NO: 7576 - RNA, 19 nt, Artificial Sequence
  Description of Artificial Sequence: Synthetic oligonucleotide
aagcgaaagccaggcagug

SEQ ID NO: 7577 - RNA, 19 nt, Artificial Sequence
  Description of Artificial Sequence: Synthetic oligonucleotide
gaagcgaaagccaggcagu

SEQ ID NO: 7578 - RNA, 19 nt, Artificial Sequence
  Description of Artificial Sequence: Synthetic oligonucleotide
ggaagcgaaagccaggcag

SEQ ID NO: 7579 - RNA, 19 nt, Artificial Sequence
  Description of Artificial Sequence: Synthetic oligonucleotide
aggaagcgaaagccaggca

SEQ ID NO: 7580 - RNA, 19 nt, Artificial Sequence
  Description of Artificial Sequence: Synthetic oligonucleotide
uaggaagcgaaagccaggc

SEQ ID NO: 7581 - RNA, 19 nt, Artificial Sequence
  Description of Artificial Sequence: Synthetic oligonucleotide
guaggaagcgaaagccagg

SEQ ID NO: 7582 - RNA, 19 nt, Artificial Sequence
  Description of Artificial Sequence: Synthetic oligonucleotide
gguaggaagcgaaagccag

SEQ ID NO: 7583 - RNA, 19 nt, Artificial Sequence
  Description of Artificial Sequence: Synthetic oligonucleotide
ggguaggaagcgaaagcca

SEQ ID NO: 7584 - RNA, 19 nt, Artificial Sequence
  Description of Artificial Sequence: Synthetic oligonucleotide
gggguaggaagcgaaagcc

SEQ ID NO: 7585 - RNA, 19 nt, Artificial Sequence
  Description of Artificial Sequence: Synthetic oligonucleotide
ggggguaggaagcgaaagc

SEQ ID NO: 7586 - RNA, 19 nt, Artificial Sequence
  Description of Artificial Sequence: Synthetic oligonucleotide
uggggguaggaagcgaaag

SEQ ID NO: 7587 - RNA, 19 nt, Artificial Sequence
  Description of Artificial Sequence: Synthetic oligonucleotide
guggggguaggaagcgaaa

SEQ ID NO: 7588 - RNA, 19 nt, Artificial Sequence
  Description of Artificial Sequence: Synthetic oligonucleotide
gguggggguaggaagcgaa

SEQ ID NO: 7589 - RNA, 19 nt, Artificial Sequence
  Description of Artificial Sequence: Synthetic oligonucleotide
ggguggggguaggaagcga

SEQ ID NO: 7590 - RNA, 19 nt, Artificial Sequence
  Description of Artificial Sequence: Synthetic oligonucleotide
gggguggggguaggaagcg

SEQ ID NO: 7591 - RNA, 19 nt, Artificial Sequence
  Description of Artificial Sequence: Synthetic oligonucleotide
ugggguggggguaggaagc

SEQ ID NO: 7592 - RNA, 19 nt, Artificial Sequence
  Description of Artificial Sequence: Synthetic oligonucleotide
augggguggggguaggaag

SEQ ID NO: 7593 - RNA, 19 nt, Artificial Sequence
  Description of Artificial Sequence: Synthetic oligonucleotide
gaugggguggggguaggaa

SEQ ID NO: 7594 - RNA, 19 nt, Artificial Sequence
  Description of Artificial Sequence: Synthetic oligonucleotide
ggaugggguggggguagga

SEQ ID NO: 7595 - RNA, 19 nt, Artificial Sequence
  Description of Artificial Sequence: Synthetic oligonucleotide
uggaugggguggggguagg

SEQ ID NO: 7596 - RNA, 19 nt, Artificial Sequence
  Description of Artificial Sequence: Synthetic oligonucleotide
guggaugggguggggguag

SEQ ID NO: 7597 - RNA, 19 nt, Artificial Sequence
  Description of Artificial Sequence: Synthetic oligonucleotide
gguggauggggugggggua

SEQ ID NO: 7598 - RNA, 19 nt, Artificial Sequence
  Description of Artificial Sequence: Synthetic oligonucleotide
ggguggauggggugggggu

SEQ ID NO: 7599 - RNA, 19 nt, Artificial Sequence
  Description of Artificial Sequence: Synthetic oligonucleotide
uggguggaugggguggggg

SEQ ID NO: 7600 - RNA, 19 nt, Artificial Sequence
  Description of Artificial Sequence: Synthetic oligonucleotide
cuggguggauggggugggg

SEQ ID NO: 7601 - RNA, 19 nt, Artificial Sequence
  Description of Artificial Sequence: Synthetic oligonucleotide
acuggguggaugggguggg

SEQ ID NO: 7602 - RNA, 19 nt, Artificial Sequence
  Description of Artificial Sequence: Synthetic oligonucleotide
cacuggguggauggggugg

SEQ ID NO: 7603 - RNA, 19 nt, Artificial Sequence
  Description of Artificial Sequence: Synthetic oligonucleotide
gcacuggguggauggggug

SEQ ID NO: 7604 - RNA, 19 nt, Artificial Sequence
  Description of Artificial Sequence: Synthetic oligonucleotide
ggcacuggguggauggggu

SEQ ID NO: 7605 - RNA, 19 nt, Artificial Sequence
  Description of Artificial Sequence: Synthetic oligonucleotide
uggcacuggguggaugggg

SEQ ID NO: 7606 - RNA, 19 nt, Artificial Sequence
  Description of Artificial Sequence: Synthetic oligonucleotide
uuggcacuggguggauggg

SEQ ID NO: 7607 - RNA, 19 nt, Artificial Sequence
  Description of Artificial Sequence: Synthetic oligonucleotide
guuggcacuggguggaugg

SEQ ID NO: 7608 - RNA, 19 nt, Artificial Sequence
  Description of Artificial Sequence: Synthetic oligonucleotide
gguuggcacuggguggaug

SEQ ID NO: 7609 - RNA, 19 nt, Artificial Sequence
  Description of Artificial Sequence: Synthetic oligonucleotide
agguuggcacuggguggau

SEQ ID NO: 7610 - RNA, 19 nt, Artificial Sequence
  Description of Artificial Sequence: Synthetic oligonucleotide
uagguuggcacugggugga

SEQ ID NO: 7611 - RNA, 19 nt, Artificial Sequence
  Description of Artificial Sequence: Synthetic oligonucleotide
cuagguuggcacugggugg

SEQ ID NO: 7612 - RNA, 19 nt, Artificial Sequence
  Description of Artificial Sequence: Synthetic oligonucleotide
acuagguuggcacugggug

SEQ ID NO: 7613 - RNA, 19 nt, Artificial Sequence
  Description of Artificial Sequence: Synthetic oligonucleotide
aacuagguuggcacugggu

SEQ ID NO: 7614 - RNA, 19 nt, Artificial Sequence
  Description of Artificial Sequence: Synthetic oligonucleotide
gaacuagguuggcacuggg

SEQ ID NO: 7615 - RNA, 19 nt, Artificial Sequence
  Description of Artificial Sequence: Synthetic oligonucleotide
ggaacuagguuggcacugg

SEQ ID NO: 7616 - RNA, 19 nt, Artificial Sequence
  Description of Artificial Sequence: Synthetic oligonucleotide
uggaacuagguuggcacug

SEQ ID NO: 7617 - RNA, 19 nt, Artificial Sequence
  Description of Artificial Sequence: Synthetic oligonucleotide
guggaacuagguuggcacu

SEQ ID NO: 7618 - RNA, 19 nt, Artificial Sequence
  Description of Artificial Sequence: Synthetic oligonucleotide
aguggaacuagguuggcac

SEQ ID NO: 7619 - RNA, 19 nt, Artificial Sequence
  Description of Artificial Sequence: Synthetic oligonucleotide
caguggaacuagguuggca

SEQ ID NO: 7620 - RNA, 19 nt, Artificial Sequence
  Description of Artificial Sequence: Synthetic oligonucleotide
ucaguggaacuagguuggc

SEQ ID NO: 7621 - RNA, 19 nt, Artificial Sequence
  Description of Artificial Sequence: Synthetic oligonucleotide
uucaguggaacuagguugg

SEQ ID NO: 7622 - RNA, 19 nt, Artificial Sequence
  Description of Artificial Sequence: Synthetic oligonucleotide
cuucaguggaacuagguug

SEQ ID NO: 7623 - RNA, 19 nt, Artificial Sequence
  Description of Artificial Sequence: Synthetic oligonucleotide
gcuucaguggaacuagguu

SEQ ID NO: 7624 - RNA, 19 nt, Artificial Sequence
  Description of Artificial Sequence: Synthetic oligonucleotide
ggcuucaguggaacuaggu

SEQ ID NO: 7625 - RNA, 19 nt, Artificial Sequence
  Description of Artificial Sequence: Synthetic oligonucleotide
aggcuucaguggaacuagg

SEQ ID NO: 7626 - RNA, 19 nt, Artificial Sequence
  Description of Artificial Sequence: Synthetic oligonucleotide
caggcuucaguggaacuag

SEQ ID NO: 7627 - RNA, 19 nt, Artificial Sequence
  Description of Artificial Sequence: Synthetic oligonucleotide
ucaggcuucaguggaacua

SEQ ID NO: 7628 - RNA, 19 nt, Artificial Sequence
  Description of Artificial Sequence: Synthetic oligonucleotide
cucaggcuucaguggaacu

SEQ ID NO: 7629 - RNA, 19 nt, Artificial Sequence
  Description of Artificial Sequence: Synthetic oligonucleotide
ccucaggcuucaguggaac

SEQ ID NO: 7630 - RNA, 19 nt, Artificial Sequence
  Description of Artificial Sequence: Synthetic oligonucleotide
uccucaggcuucaguggaa

SEQ ID NO: 7631 - RNA, 19 nt, Artificial Sequence
  Description of Artificial Sequence: Synthetic oligonucleotide
cuccucaggcuucagugga

SEQ ID NO: 7632 - RNA, 19 nt, Artificial Sequence
  Description of Artificial Sequence: Synthetic oligonucleotide
gcuccucaggcuucagugg

SEQ ID NO: 7633 - RNA, 19 nt, Artificial Sequence
  Description of Artificial Sequence: Synthetic oligonucleotide
ugcuccucaggcuucagug

SEQ ID NO: 7634 - RNA, 19 nt, Artificial Sequence
  Description of Artificial Sequence: Synthetic oligonucleotide
augcuccucaggcuucagu

SEQ ID NO: 7635 - RNA, 19 nt, Artificial Sequence
  Description of Artificial Sequence: Synthetic oligonucleotide
caugcuccucaggcuucag

SEQ ID NO: 7636 - RNA, 19 nt, Artificial Sequence
  Description of Artificial Sequence: Synthetic oligonucleotide
gcaugcuccucaggcuuca

SEQ ID NO: 7637 - RNA, 19 nt, Artificial Sequence
  Description of Artificial Sequence: Synthetic oligonucleotide
ggcaugcuccucaggcuuc

SEQ ID NO: 7638 - RNA, 19 nt, Artificial Sequence
  Description of Artificial Sequence: Synthetic oligonucleotide
uggcaugcuccucaggcuu

SEQ ID NO: 7639 - RNA, 19 nt, Artificial Sequence
  Description of Artificial Sequence: Synthetic oligonucleotide
auggcaugcuccucaggcu

SEQ ID NO: 7640 - RNA, 19 nt, Artificial Sequence
  Description of Artificial Sequence: Synthetic oligonucleotide
aauggcaugcuccucaggc

SEQ ID NO: 7641 - RNA, 19 nt, Artificial Sequence
  Description of Artificial Sequence: Synthetic oligonucleotide
uaauggcaugcuccucagg

SEQ ID NO: 7642 - RNA, 19 nt, Artificial Sequence
  Description of Artificial Sequence: Synthetic oligonucleotide
uuaauggcaugcuccucag

SEQ ID NO: 7643 - RNA, 19 nt, Artificial Sequence
  Description of Artificial Sequence: Synthetic oligonucleotide
cuuaauggcaugcuccuca

SEQ ID NO: 7644 - RNA, 19 nt, Artificial Sequence
  Description of Artificial Sequence: Synthetic oligonucleotide
acuuaauggcaugcuccuc

SEQ ID NO: 7645 - RNA, 19 nt, Artificial Sequence
  Description of Artificial Sequence: Synthetic oligonucleotide
aacuuaauggcaugcuccu

SEQ ID NO: 7646 - RNA, 19 nt, Artificial Sequence
  Description of Artificial Sequence: Synthetic oligonucleotide
aaacuuaauggcaugcucc

SEQ ID NO: 7647 - RNA, 19 nt, Artificial Sequence
  Description of Artificial Sequence: Synthetic oligonucleotide
caaacuuaauggcaugcuc

SEQ ID NO: 7648 - RNA, 19 nt, Artificial Sequence
  Description of Artificial Sequence: Synthetic oligonucleotide
ucaaacuuaauggcaugcu

SEQ ID NO: 7649 - RNA, 19 nt, Artificial Sequence
  Description of Artificial Sequence: Synthetic oligonucleotide
cucaaacuuaauggcaugc

SEQ ID NO: 7650 - RNA, 19 nt, Artificial Sequence
  Description of Artificial Sequence: Synthetic oligonucleotide
acucaaacuuaauggcaug

SEQ ID NO: 7651 - RNA, 19 nt, Artificial Sequence
  Description of Artificial Sequence: Synthetic oligonucleotide
uacucaaacuuaauggcau

SEQ ID NO: 7652 - RNA, 19 nt, Artificial Sequence
  Description of Artificial Sequence: Synthetic oligonucleotide
auacucaaacuuaauggca

SEQ ID NO: 7653 - RNA, 19 nt, Artificial Sequence
  Description of Artificial Sequence: Synthetic oligonucleotide
uauacucaaacuuaauggc

SEQ ID NO: 7654 - RNA, 19 nt, Artificial Sequence
  Description of Artificial Sequence: Synthetic oligonucleotide
auauacucaaacuuaaugg

SEQ ID NO: 7655 - RNA, 19 nt, Artificial Sequence
  Description of Artificial Sequence: Synthetic oligonucleotide
aauauacucaaacuuaaug

SEQ ID NO: 7656 - RNA, 19 nt, Artificial Sequence
  Description of Artificial Sequence: Synthetic oligonucleotide
caauauacucaaacuuaau

SEQ ID NO: 7657 - RNA, 19 nt, Artificial Sequence
  Description of Artificial Sequence: Synthetic oligonucleotide
ccaauauacucaaacuuaa

SEQ ID NO: 7658 - RNA, 19 nt, Artificial Sequence
  Description of Artificial Sequence: Synthetic oligonucleotide
cccaauauacucaaacuua

SEQ ID NO: 7659 - RNA, 19 nt, Artificial Sequence
  Description of Artificial Sequence: Synthetic oligonucleotide
gcccaauauacucaaacuu

SEQ ID NO: 7660 - RNA, 19 nt, Artificial Sequence
  Description of Artificial Sequence: Synthetic oligonucleotide
agcccaauauacucaaacu

SEQ ID NO: 7661 - RNA, 19 nt, Artificial Sequence
  Description of Artificial Sequence: Synthetic oligonucleotide
cagcccaauauacucaaac

SEQ ID NO: 7662 - RNA, 19 nt, Artificial Sequence
  Description of Artificial Sequence: Synthetic oligonucleotide
ccagcccaauauacucaaa

SEQ ID NO: 7663 - RNA, 19 nt, Artificial Sequence
  Description of Artificial Sequence: Synthetic oligonucleotide
cccagcccaauauacucaa

SEQ ID NO: 7664 - RNA, 19 nt, Artificial Sequence
  Description of Artificial Sequence: Synthetic oligonucleotide
gcccagcccaauauacuca

SEQ ID NO: 7665 - RNA, 19 nt, Artificial Sequence
  Description of Artificial Sequence: Synthetic oligonucleotide
cgcccagcccaauauacuc

SEQ ID NO: 7666 - RNA, 19 nt, Artificial Sequence
  Description of Artificial Sequence: Synthetic oligonucleotide
gcgcccagcccaauauacu

SEQ ID NO: 7667 - RNA, 19 nt, Artificial Sequence
  Description of Artificial Sequence: Synthetic oligonucleotide
agcgcccagcccaauauac

SEQ ID NO: 7668 - RNA, 19 nt, Artificial Sequence
  Description of Artificial Sequence: Synthetic oligonucleotide
cagcgcccagcccaauaua

SEQ ID NO: 7669 - RNA, 19 nt, Artificial Sequence
  Description of Artificial Sequence: Synthetic oligonucleotide
acagcgcccagcccaauau

SEQ ID NO: 7670 - RNA, 19 nt, Artificial Sequence
  Description of Artificial Sequence: Synthetic oligonucleotide
cacagcgcccagcccaaua

SEQ ID NO: 7671 - RNA, 19 nt, Artificial Sequence
  Description of Artificial Sequence: Synthetic oligonucleotide
ccacagcgcccagcccaau

SEQ ID NO: 7672 - RNA, 19 nt, Artificial Sequence
  Description of Artificial Sequence: Synthetic oligonucleotide
gccacagcgcccagcccaa

SEQ ID NO: 7673 - RNA, 19 nt, Artificial Sequence
  Description of Artificial Sequence: Synthetic oligonucleotide
agccacagcgcccagccca

SEQ ID NO: 7674 - RNA, 19 nt, Artificial Sequence
  Description of Artificial Sequence: Synthetic oligonucleotide
cagccacagcgcccagccc

SEQ ID NO: 7675 - RNA, 19 nt, Artificial Sequence
  Description of Artificial Sequence: Synthetic oligonucleotide
ucagccacagcgcccagcc

SEQ ID NO: 7676 - RNA, 19 nt, Artificial Sequence
  Description of Artificial Sequence: Synthetic oligonucleotide
gucagccacagcgcccagc

SEQ ID NO: 7677 - RNA, 19 nt, Artificial Sequence
  Description of Artificial Sequence: Synthetic oligonucleotide
agucagccacagcgcccag

SEQ ID NO: 7678 - RNA, 19 nt, Artificial Sequence
  Description of Artificial Sequence: Synthetic oligonucleotide
cagucagccacagcgccca

SEQ ID NO: 7679 - RNA, 19 nt, Artificial Sequence
  Description of Artificial Sequence: Synthetic oligonucleotide
acagucagccacagcgccc

SEQ ID NO: 7680 - RNA, 19 nt, Artificial Sequence
  Description of Artificial Sequence: Synthetic oligonucleotide
cacagucagccacagcgcc

SEQ ID NO: 7681 - RNA, 19 nt, Artificial Sequence
  Description of Artificial Sequence: Synthetic oligonucleotide
acacagucagccacagcgc

SEQ ID NO: 7682 - RNA, 19 nt, Artificial Sequence
  Description of Artificial Sequence: Synthetic oligonucleotide
cacacagucagccacagcg

SEQ ID NO: 7683 - RNA, 19 nt, Artificial Sequence
  Description of Artificial Sequence: Synthetic oligonucleotide
ccacacagucagccacagc

SEQ ID NO: 7684 - RNA, 19 nt, Artificial Sequence
  Description of Artificial Sequence: Synthetic oligonucleotide
cccacacagucagccacag

SEQ ID NO: 7685 - RNA, 19 nt, Artificial Sequence
  Description of Artificial Sequence: Synthetic oligonucleotide
acccacacagucagccaca

SEQ ID NO: 7686 - RNA, 19 nt, Artificial Sequence
  Description of Artificial Sequence: Synthetic oligonucleotide
uacccacacagucagccac

SEQ ID NO: 7687 - RNA, 19 nt, Artificial Sequence
  Description of Artificial Sequence: Synthetic oligonucleotide
auacccacacagucagcca

SEQ ID NO: 7688 - RNA, 19 nt, Artificial Sequence
  Description of Artificial Sequence: Synthetic oligonucleotide
gauacccacacagucagcc

SEQ ID NO: 7689 - RNA, 19 nt, Artificial Sequence
  Description of Artificial Sequence: Synthetic oligonucleotide
ugauacccacacagucagc

SEQ ID NO: 7690 - RNA, 19 nt, Artificial Sequence
  Description of Artificial Sequence: Synthetic oligonucleotide
uugauacccacacagucag

SEQ ID NO: 7691 - RNA, 19 nt, Artificial Sequence
  Description of Artificial Sequence: Synthetic oligonucleotide
guugauacccacacaguca

SEQ ID NO: 7692 - RNA, 19 nt, Artificial Sequence
  Description of Artificial Sequence: Synthetic oligonucleotide
cguugauacccacacaguc

SEQ ID NO: 7693 - RNA, 19 nt, Artificial Sequence
  Description of Artificial Sequence: Synthetic oligonucleotide
acguugauacccacacagu

SEQ ID NO: 7694 - RNA, 19 nt, Artificial Sequence
  Description of Artificial Sequence: Synthetic oligonucleotide
cacguugauacccacacag

SEQ ID NO: 7695 - RNA, 19 nt, Artificial Sequence
  Description of Artificial Sequence: Synthetic oligonucleotide
ucacguugauacccacaca

SEQ ID NO: 7696 - RNA, 19 nt, Artificial Sequence
  Description of Artificial Sequence: Synthetic oligonucleotide
gucacguugauacccacac

SEQ ID NO: 7697 - RNA, 19 nt, Artificial Sequence
  Description of Artificial Sequence: Synthetic oligonucleotide
ggucacguugauacccaca

SEQ ID NO: 7698 - RNA, 19 nt, Artificial Sequence
  Description of Artificial Sequence: Synthetic oligonucleotide
cggucacguugauacccac

SEQ ID NO: 7699 - RNA, 19 nt, Artificial Sequence
  Description of Artificial Sequence: Synthetic oligonucleotide
acggucacguugauaccca

SEQ ID NO: 7700 - RNA, 19 nt, Artificial Sequence
  Description of Artificial Sequence: Synthetic oligonucleotide
cacggucacguugauaccc

SEQ ID NO: 7701 - RNA, 19 nt, Artificial Sequence
  Description of Artificial Sequence: Synthetic oligonucleotide
ccacggucacguugauacc

SEQ ID NO: 7702 - RNA, 19 nt, Artificial Sequence
  Description of Artificial Sequence: Synthetic oligonucleotide
cccacggucacguugauac

SEQ ID NO: 7703 - RNA, 19 nt, Artificial Sequence
  Description of Artificial Sequence: Synthetic oligonucleotide
acccacggucacguugaua

SEQ ID NO: 7704 - RNA, 19 nt, Artificial Sequence
  Description of Artificial Sequence: Synthetic oligonucleotide
cacccacggucacguugau

SEQ ID NO: 7705 - RNA, 19 nt, Artificial Sequence
  Description of Artificial Sequence: Synthetic oligonucleotide
ccacccacggucacguuga

SEQ ID NO: 7706 - RNA, 19 nt, Artificial Sequence
  Description of Artificial Sequence: Synthetic oligonucleotide
accacccacggucacguug

SEQ ID NO: 7707 - RNA, 19 nt, Artificial Sequence
  Description of Artificial Sequence: Synthetic oligonucleotide
caccacccacggucacguu

SEQ ID NO: 7708 - RNA, 19 nt, Artificial Sequence
  Description of Artificial Sequence: Synthetic oligonucleotide
ucaccacccacggucacgu

SEQ ID NO: 7709 - RNA, 19 nt, Artificial Sequence
  Description of Artificial Sequence: Synthetic oligonucleotide
cucaccacccacggucacg

SEQ ID NO: 7710 - RNA, 19 nt, Artificial Sequence
  Description of Artificial Sequence: Synthetic oligonucleotide
ucucaccacccacggucac

SEQ ID NO: 7711 - RNA, 19 nt, Artificial Sequence
  Description of Artificial Sequence: Synthetic oligonucleotide
cucucaccacccacgguca

SEQ ID NO: 7712 - RNA, 19 nt, Artificial Sequence
  Description of Artificial Sequence: Synthetic oligonucleotide
gcucucaccacccacgguc

SEQ ID NO: 7713 - RNA, 19 nt, Artificial Sequence
  Description of Artificial Sequence: Synthetic oligonucleotide
agcucucaccacccacggu

SEQ ID NO: 7714 - RNA, 19 nt, Artificial Sequence
  Description of Artificial Sequence: Synthetic oligonucleotide
cagcucucaccacccacgg

SEQ ID NO: 7715 - RNA, 19 nt, Artificial Sequence
  Description of Artificial Sequence: Synthetic oligonucleotide
gcagcucucaccacccacg

SEQ ID NO: 7716 - RNA, 19 nt, Artificial Sequence
  Description of Artificial Sequence: Synthetic oligonucleotide
ggcagcucucaccacccac

SEQ ID NO: 7717 - RNA, 19 nt, Artificial Sequence
  Description of Artificial Sequence: Synthetic oligonucleotide
uggcagcucucaccaccca

SEQ ID NO: 7718 - RNA, 19 nt, Artificial Sequence
  Description of Artificial Sequence: Synthetic oligonucleotide
cuggcagcucucaccaccc

SEQ ID NO: 7719 - RNA, 19 nt, Artificial Sequence
  Description of Artificial Sequence: Synthetic oligonucleotide
gcuggcagcucucaccacc

SEQ ID NO: 7720 - RNA, 19 nt, Artificial Sequence
  Description of Artificial Sequence: Synthetic oligonucleotide
ugcuggcagcucucaccac

SEQ ID NO: 7721 - RNA, 19 nt, Artificial Sequence
  Description of Artificial Sequence: Synthetic oligonucleotide
gugcuggcagcucucacca

SEQ ID NO: 7722 - RNA, 19 nt, Artificial Sequence
  Description of Artificial Sequence: Synthetic oligonucleotide
cgugcuggcagcucucacc

SEQ ID NO: 7723 - RNA, 19 nt, Artificial Sequence
  Description of Artificial Sequence: Synthetic oligonucleotide
ucgugcuggcagcucucac

SEQ ID NO: 7724 - RNA, 19 nt, Artificial Sequence
  Description of Artificial Sequence: Synthetic oligonucleotide
cucgugcuggcagcucuca

SEQ ID NO: 7725 - RNA, 19 nt, Artificial Sequence
  Description of Artificial Sequence: Synthetic oligonucleotide
acucgugcuggcagcucuc

SEQ ID NO: 7726 - RNA, 19 nt, Artificial Sequence
  Description of Artificial Sequence: Synthetic oligonucleotide
aacucgugcuggcagcucu

SEQ ID NO: 7727 - RNA, 19 nt, Artificial Sequence
  Description of Artificial Sequence: Synthetic oligonucleotide
gaacucgugcuggcagcuc

SEQ ID NO: 7728 - RNA, 19 nt, Artificial Sequence
  Description of Artificial Sequence: Synthetic oligonucleotide
ggaacucgugcuggcagcu

SEQ ID NO: 7729 - RNA, 19 nt, Artificial Sequence
  Description of Artificial Sequence: Synthetic oligonucleotide
cggaacucgugcuggcagc

SEQ ID NO: 7730 - RNA, 19 nt, Artificial Sequence
  Description of Artificial Sequence: Synthetic oligonucleotide
ccggaacucgugcuggcag

SEQ ID NO: 7731 - RNA, 19 nt, Artificial Sequence
  Description of Artificial Sequence: Synthetic oligonucleotide
cccggaacucgugcuggca

SEQ ID NO: 7732 - RNA, 19 nt, Artificial Sequence
  Description of Artificial Sequence: Synthetic oligonucleotide
ccccggaacucgugcuggc

SEQ ID NO: 7733 - RNA, 19 nt, Artificial Sequence
  Description of Artificial Sequence: Synthetic oligonucleotide
cccccggaacucgugcugg

SEQ ID NO: 7734 - RNA, 19 nt, Artificial Sequence
  Description of Artificial Sequence: Synthetic oligonucleotide
ccccccggaacucgugcug

SEQ ID NO: 7735 - RNA, 19 nt, Artificial Sequence
  Description of Artificial Sequence: Synthetic oligonucleotide
uccccccggaacucgugcu

SEQ ID NO: 7736 - RNA, 19 nt, Artificial Sequence
  Description of Artificial Sequence: Synthetic oligonucleotide
guccccccggaacucgugc

SEQ ID NO: 7737 - RNA, 19 nt, Artificial Sequence
  Description of Artificial Sequence: Synthetic oligonucleotide
uguccccccggaacucgug

SEQ ID NO: 7738 - RNA, 19 nt, Artificial Sequence
  Description of Artificial Sequence: Synthetic oligonucleotide
auguccccccggaacucgu

SEQ ID NO: 7739 - RNA, 19 nt, Artificial Sequence
  Description of Artificial Sequence: Synthetic oligonucleotide
cauguccccccggaacucg

SEQ ID NO: 7740 - RNA, 19 nt, Artificial Sequence
  Description of Artificial Sequence: Synthetic oligonucleotide
ccauguccccccggaacuc

SEQ ID NO: 7741 - RNA, 19 nt, Artificial Sequence
  Description of Artificial Sequence: Synthetic oligonucleotide
accauguccccccggaacu

SEQ ID NO: 7742 - RNA, 19 nt, Artificial Sequence
  Description of Artificial Sequence: Synthetic oligonucleotide
aaccauguccccccggaac

SEQ ID NO: 7743 - RNA, 19 nt, Artificial Sequence
  Description of Artificial Sequence: Synthetic oligonucleotide
caaccauguccccccggaa

SEQ ID NO: 7744 - RNA, 19 nt, Artificial Sequence
  Description of Artificial Sequence: Synthetic oligonucleotide
acaaccauguccccccgga

SEQ ID NO: 7745 - RNA, 19 nt, Artificial Sequence
  Description of Artificial Sequence: Synthetic oligonucleotide
gacaaccauguccccccgg

SEQ ID NO: 7746 - RNA, 19 nt, Artificial Sequence
  Description of Artificial Sequence: Synthetic oligonucleotide
agacaaccauguccccccg

SEQ ID NO: 7747 - RNA, 19 nt, Artificial Sequence
  Description of Artificial Sequence: Synthetic oligonucleotide
cagacaaccaugucccccc

SEQ ID NO: 7748 - RNA, 19 nt, Artificial Sequence
  Description of Artificial Sequence: Synthetic oligonucleotide
gcagacaaccauguccccc

SEQ ID NO: 7749 - RNA, 19 nt, Artificial Sequence
  Description of Artificial Sequence: Synthetic oligonucleotide
ggcagacaaccaugucccc

SEQ ID NO: 7750 - RNA, 19 nt, Artificial Sequence
  Description of Artificial Sequence: Synthetic oligonucleotide
gggcagacaaccauguccc

SEQ ID NO: 7751 - RNA, 19 nt, Artificial Sequence
  Description of Artificial Sequence: Synthetic oligonucleotide
ggggcagacaaccaugucc

SEQ ID NO: 7752 - RNA, 19 nt, Artificial Sequence
  Description of Artificial Sequence: Synthetic oligonucleotide
gggggcagacaaccauguc

SEQ ID NO: 7753 - RNA, 19 nt, Artificial Sequence
  Description of Artificial Sequence: Synthetic oligonucleotide
agggggcagacaaccaugu

SEQ ID NO: 7754 - RNA, 19 nt, Artificial Sequence
  Description of Artificial Sequence: Synthetic oligonucleotide
cagggggcagacaaccaug

SEQ ID NO: 7755 - RNA, 19 nt, Artificial Sequence
  Description of Artificial Sequence: Synthetic oligonucleotide
gcagggggcagacaaccau

SEQ ID NO: 7756 - RNA, 19 nt, Artificial Sequence
  Description of Artificial Sequence: Synthetic oligonucleotide
ggcagggggcagacaacca

SEQ ID NO: 7757 - RNA, 19 nt, Artificial Sequence
  Description of Artificial Sequence: Synthetic oligonucleotide
gggcagggggcagacaacc

SEQ ID NO: 7758 - RNA, 19 nt, Artificial Sequence
  Description of Artificial Sequence: Synthetic oligonucleotide
ggggcagggggcagacaac

SEQ ID NO: 7759 - RNA, 19 nt, Artificial Sequence
  Description of Artificial Sequence: Synthetic oligonucleotide
gggggcagggggcagacaa

SEQ ID NO: 7760 - RNA, 19 nt, Artificial Sequence
  Description of Artificial Sequence: Synthetic oligonucleotide
ugggggcagggggcagaca

SEQ ID NO: 7761 - RNA, 19 nt, Artificial Sequence
  Description of Artificial Sequence: Synthetic oligonucleotide
augggggcagggggcagac

SEQ ID NO: 7762 - RNA, 19 nt, Artificial Sequence
  Description of Artificial Sequence: Synthetic oligonucleotide
gaugggggcagggggcaga

SEQ ID NO: 7763 - RNA, 19 nt, Artificial Sequence
  Description of Artificial Sequence: Synthetic oligonucleotide
ggaugggggcagggggcag

SEQ ID NO: 7764 - RNA, 19 nt, Artificial Sequence
  Description of Artificial Sequence: Synthetic oligonucleotide
gggaugggggcagggggca

SEQ ID NO: 7765 - RNA, 19 nt, Artificial Sequence
  Description of Artificial Sequence: Synthetic oligonucleotide
agggaugggggcagggggc

SEQ ID NO: 7766 - RNA, 19 nt, Artificial Sequence
  Description of Artificial Sequence: Synthetic oligonucleotide
cagggaugggggcaggggg

SEQ ID NO: 7767 - RNA, 19 nt, Artificial Sequence
  Description of Artificial Sequence: Synthetic oligonucleotide
gcagggaugggggcagggg

SEQ ID NO: 7768 - RNA, 19 nt, Artificial Sequence
  Description of Artificial Sequence: Synthetic oligonucleotide
ugcagggaugggggcaggg

SEQ ID NO: 7769 - RNA, 19 nt, Artificial Sequence
  Description of Artificial Sequence: Synthetic oligonucleotide
cugcagggaugggggcagg

SEQ ID NO: 7770 - RNA, 19 nt, Artificial Sequence
  Description of Artificial Sequence: Synthetic oligonucleotide
gcugcagggaugggggcag

SEQ ID NO: 7771 - RNA, 19 nt, Artificial Sequence
  Description of Artificial Sequence: Synthetic oligonucleotide
agcugcagggaugggggca

SEQ ID NO: 7772 - RNA, 19 nt, Artificial Sequence
  Description of Artificial Sequence: Synthetic oligonucleotide
aagcugcagggaugggggc

SEQ ID NO: 7773 - RNA, 19 nt, Artificial Sequence
  Description of Artificial Sequence: Synthetic oligonucleotide
caagcugcagggauggggg

SEQ ID NO: 7774 - RNA, 19 nt, Artificial Sequence
  Description of Artificial Sequence: Synthetic oligonucleotide
ccaagcugcagggaugggg

SEQ ID NO: 7775 - RNA, 19 nt, Artificial Sequence
  Description of Artificial Sequence: Synthetic oligonucleotide
gccaagcugcagggauggg

SEQ ID NO: 7776 - RNA, 19 nt, Artificial Sequence
  Description of Artificial Sequence: Synthetic oligonucleotide
ggccaagcugcagggaugg

SEQ ID NO: 7777 - RNA, 19 nt, Artificial Sequence
  Description of Artificial Sequence: Synthetic oligonucleotide
uggccaagcugcagggaug

SEQ ID NO: 7778 - RNA, 19 nt, Artificial Sequence
  Description of Artificial Sequence: Synthetic oligonucleotide
cuggccaagcugcagggau

SEQ ID NO: 7779 - RNA, 19 nt, Artificial Sequence
  Description of Artificial Sequence: Synthetic oligonucleotide
ccuggccaagcugcaggga

SEQ ID NO: 7780 - RNA, 19 nt, Artificial Sequence
  Description of Artificial Sequence: Synthetic oligonucleotide
uccuggccaagcugcaggg

SEQ ID NO: 7781 - RNA, 19 nt, Artificial Sequence
  Description of Artificial Sequence: Synthetic oligonucleotide
auccuggccaagcugcagg

SEQ ID NO: 7782 - RNA, 19 nt, Artificial Sequence
  Description of Artificial Sequence: Synthetic oligonucleotide
cauccuggccaagcugcag

SEQ ID NO: 7783 - RNA, 19 nt, Artificial Sequence
  Description of Artificial Sequence: Synthetic oligonucleotide
ccauccuggccaagcugca

SEQ ID NO: 7784 - RNA, 19 nt, Artificial Sequence
  Description of Artificial Sequence: Synthetic oligonucleotide
accauccuggccaagcugc

SEQ ID NO: 7785 - RNA, 19 nt, Artificial Sequence
  Description of Artificial Sequence: Synthetic oligonucleotide
caccauccuggccaagcug

SEQ ID NO: 7786 - RNA, 19 nt, Artificial Sequence
  Description of Artificial Sequence: Synthetic oligonucleotide
gcaccauccuggccaagcu

SEQ ID NO: 7787 - RNA, 19 nt, Artificial Sequence
  Description of Artificial Sequence: Synthetic oligonucleotide
ggcaccauccuggccaagc

SEQ ID NO: 7788 - RNA, 19 nt, Artificial Sequence
  Description of Artificial Sequence: Synthetic oligonucleotide
gggcaccauccuggccaag

SEQ ID NO: 7789 - RNA, 19 nt, Artificial Sequence
  Description of Artificial Sequence: Synthetic oligonucleotide
ggggcaccauccuggccaa

SEQ ID NO: 7790 - RNA, 19 nt, Artificial Sequence
  Description of Artificial Sequence: Synthetic oligonucleotide
uggggcaccauccuggcca

SEQ ID NO: 7791 - RNA, 19 nt, Artificial Sequence
  Description of Artificial Sequence: Synthetic oligonucleotide
auggggcaccauccuggcc

SEQ ID NO: 7792 - RNA, 19 nt, Artificial Sequence
  Description of Artificial Sequence: Synthetic oligonucleotide
aauggggcaccauccuggc

SEQ ID NO: 7793 - RNA, 19 nt, Artificial Sequence
  Description of Artificial Sequence: Synthetic oligonucleotide
caauggggcaccauccugg

SEQ ID NO: 7794 - RNA, 19 nt, Artificial Sequence
  Description of Artificial Sequence: Synthetic oligonucleotide
gcaauggggcaccauccug

SEQ ID NO: 7795 - RNA, 19 nt, Artificial Sequence
  Description of Artificial Sequence: Synthetic oligonucleotide
ugcaauggggcaccauccu

SEQ ID NO: 7796 - RNA, 19 nt, Artificial Sequence
  Description of Artificial Sequence: Synthetic oligonucleotide
cugcaauggggcaccaucc

SEQ ID NO: 7797 - RNA, 19 nt, Artificial Sequence
  Description of Artificial Sequence: Synthetic oligonucleotide
ccugcaauggggcaccauc

SEQ ID NO: 7798 - RNA, 19 nt, Artificial Sequence
  Description of Artificial Sequence: Synthetic oligonucleotide
accugcaauggggcaccau

SEQ ID NO: 7799 - RNA, 19 nt, Artificial Sequence
  Description of Artificial Sequence: Synthetic oligonucleotide
gaccugcaauggggcacca

SEQ ID NO: 7800 - RNA, 19 nt, Artificial Sequence
  Description of Artificial Sequence: Synthetic oligonucleotide
agaccugcaauggggcacc

SEQ ID NO: 7801 - RNA, 19 nt, Artificial Sequence
  Description of Artificial Sequence: Synthetic oligonucleotide
cagaccugcaauggggcac

SEQ ID NO: 7802 - RNA, 19 nt, Artificial Sequence
  Description of Artificial Sequence: Synthetic oligonucleotide
gcagaccugcaauggggca

SEQ ID NO: 7803 - RNA, 19 nt, Artificial Sequence
  Description of Artificial Sequence: Synthetic oligonucleotide
cgcagaccugcaauggggc

SEQ ID NO: 7804 - RNA, 19 nt, Artificial Sequence
  Description of Artificial Sequence: Synthetic oligonucleotide
acgcagaccugcaaugggg

SEQ ID NO: 7805 - RNA, 19 nt, Artificial Sequence
  Description of Artificial Sequence: Synthetic oligonucleotide
uacgcagaccugcaauggg

SEQ ID NO: 7806 - RNA, 19 nt, Artificial Sequence
  Description of Artificial Sequence: Synthetic oligonucleotide
cuacgcagaccugcaaugg

SEQ ID NO: 7807 - RNA, 19 nt, Artificial Sequence
  Description of Artificial Sequence: Synthetic oligonucleotide
ucuacgcagaccugcaaug

SEQ ID NO: 7808 - RNA, 19 nt, Artificial Sequence
  Description of Artificial Sequence: Synthetic oligonucleotide
aucuacgcagaccugcaau

SEQ ID NO: 7809 - RNA, 19 nt, Artificial Sequence
  Description of Artificial Sequence: Synthetic oligonucleotide
caucuacgcagaccugcaa

SEQ ID NO: 7810 - RNA, 19 nt, Artificial Sequence
  Description of Artificial Sequence: Synthetic oligonucleotide
ccaucuacgcagaccugca

SEQ ID NO: 7811 - RNA, 19 nt, Artificial Sequence
  Description of Artificial Sequence: Synthetic oligonucleotide
accaucuacgcagaccugc

SEQ ID NO: 7812 - RNA, 19 nt, Artificial Sequence
  Description of Artificial Sequence: Synthetic oligonucleotide
caccaucuacgcagaccug

SEQ ID NO: 7813 - RNA, 19 nt, Artificial Sequence
  Description of Artificial Sequence: Synthetic oligonucleotide
ucaccaucuacgcagaccu

SEQ ID NO: 7814 - RNA, 19 nt, Artificial Sequence
  Description of Artificial Sequence: Synthetic oligonucleotide
uucaccaucuacgcagacc

SEQ ID NO: 7815 - RNA, 19 nt, Artificial Sequence
  Description of Artificial Sequence: Synthetic oligonucleotide
auucaccaucuacgcagac

SEQ ID NO: 7816 - RNA, 19 nt, Artificial Sequence
  Description of Artificial Sequence: Synthetic oligonucleotide
cauucaccaucuacgcaga

SEQ ID NO: 7817 - RNA, 19 nt, Artificial Sequence
  Description of Artificial Sequence: Synthetic oligonucleotide
acauucaccaucuacgcag

SEQ ID NO: 7818 - RNA, 19 nt, Artificial Sequence
  Description of Artificial Sequence: Synthetic oligonucleotide
gacauucaccaucuacgca

SEQ ID NO: 7819 - RNA, 19 nt, Artificial Sequence
  Description of Artificial Sequence: Synthetic oligonucleotide
ugacauucaccaucuacgc

SEQ ID NO: 7820 - RNA, 19 nt, Artificial Sequence
  Description of Artificial Sequence: Synthetic oligonucleotide
augacauucaccaucuacg

SEQ ID NO: 7821 - RNA, 19 nt, Artificial Sequence
  Description of Artificial Sequence: Synthetic oligonucleotide
uaugacauucaccaucuac

SEQ ID NO: 7822 - RNA, 19 nt, Artificial Sequence
  Description of Artificial Sequence: Synthetic oligonucleotide
auaugacauucaccaucua

SEQ ID NO: 7823 - RNA, 19 nt, Artificial Sequence
  Description of Artificial Sequence: Synthetic oligonucleotide
gauaugacauucaccaucu

SEQ ID NO: 7824 - RNA, 19 nt, Artificial Sequence
  Description of Artificial Sequence: Synthetic oligonucleotide
ggauaugacauucaccauc

SEQ ID NO: 7825 - RNA, 19 nt, Artificial Sequence
  Description of Artificial Sequence: Synthetic oligonucleotide
aggauaugacauucaccau

SEQ ID NO: 7826 - RNA, 19 nt, Artificial Sequence
  Description of Artificial Sequence: Synthetic oligonucleotide
caggauaugacauucacca

SEQ ID NO: 7827 - RNA, 19 nt, Artificial Sequence
  Description of Artificial Sequence: Synthetic oligonucleotide
ccaggauaugacauucacc

SEQ ID NO: 7828 - RNA, 19 nt, Artificial Sequence
  Description of Artificial Sequence: Synthetic oligonucleotide
cccaggauaugacauucac

SEQ ID NO: 7829 - RNA, 19 nt, Artificial Sequence
  Description of Artificial Sequence: Synthetic oligonucleotide
acccaggauaugacauuca

SEQ ID NO: 7830 - RNA, 19 nt, Artificial Sequence
  Description of Artificial Sequence: Synthetic oligonucleotide
uacccaggauaugacauuc

SEQ ID NO: 7831 - RNA, 19 nt, Artificial Sequence
  Description of Artificial Sequence: Synthetic oligonucleotide
cuacccaggauaugacauu

SEQ ID NO: 7832 - RNA, 19 nt, Artificial Sequence
  Description of Artificial Sequence: Synthetic oligonucleotide
ucuacccaggauaugacau

SEQ ID NO: 7833 - RNA, 19 nt, Artificial Sequence
  Description of Artificial Sequence: Synthetic oligonucleotide
cucuacccaggauaugaca

SEQ ID NO: 7834 - RNA, 19 nt, Artificial Sequence
  Description of Artificial Sequence: Synthetic oligonucleotide
acucuacccaggauaugac

SEQ ID NO: 7835 - RNA, 19 nt, Artificial Sequence
  Description of Artificial Sequence: Synthetic oligonucleotide
cacucuacccaggauauga

SEQ ID NO: 7836 - RNA, 19 nt, Artificial Sequence
  Description of Artificial Sequence: Synthetic oligonucleotide
ccacucuacccaggauaug

SEQ ID NO: 7837 - RNA, 19 nt, Artificial Sequence
  Description of Artificial Sequence: Synthetic oligonucleotide
accacucuacccaggauau

SEQ ID NO: 7838 - RNA, 19 nt, Artificial Sequence
  Description of Artificial Sequence: Synthetic oligonucleotide
caccacucuacccaggaua

SEQ ID NO: 7839 - RNA, 19 nt, Artificial Sequence
  Description of Artificial Sequence: Synthetic oligonucleotide
gcaccacucuacccaggau

SEQ ID NO: 7840 - RNA, 19 nt, Artificial Sequence
  Description of Artificial Sequence: Synthetic oligonucleotide
cgcaccacucuacccagga

SEQ ID NO: 7841 - RNA, 19 nt, Artificial Sequence
  Description of Artificial Sequence: Synthetic oligonucleotide
ccgcaccacucuacccagg

SEQ ID NO: 7842 - RNA, 19 nt, Artificial Sequence
  Description of Artificial Sequence: Synthetic oligonucleotide
gccgcaccacucuacccag

SEQ ID NO: 7843 - RNA, 19 nt, Artificial Sequence
  Description of Artificial Sequence: Synthetic oligonucleotide
ggccgcaccacucuaccca

SEQ ID NO: 7844 - RNA, 19 nt, Artificial Sequence
  Description of Artificial Sequence: Synthetic oligonucleotide
uggccgcaccacucuaccc

SEQ ID NO: 7845 - RNA, 19 nt, Artificial Sequence
  Description of Artificial Sequence: Synthetic oligonucleotide
cuggccgcaccacucuacc

SEQ ID NO: 7846 - RNA, 19 nt, Artificial Sequence
  Description of Artificial Sequence: Synthetic oligonucleotide
ccuggccgcaccacucuac

SEQ ID NO: 7847 - RNA, 19 nt, Artificial Sequence
  Description of Artificial Sequence: Synthetic oligonucleotide
cccuggccgcaccacucua

SEQ ID NO: 7848 - RNA, 19 nt, Artificial Sequence
  Description of Artificial Sequence: Synthetic oligonucleotide
gcccuggccgcaccacucu

SEQ ID NO: 7849 - RNA, 19 nt, Artificial Sequence
  Description of Artificial Sequence: Synthetic oligonucleotide
ggcccuggccgcaccacuc

SEQ ID NO: 7850 - RNA, 19 nt, Artificial Sequence
  Description of Artificial Sequence: Synthetic oligonucleotide
uggcccuggccgcaccacu

SEQ ID NO: 7851 - RNA, 19 nt, Artificial Sequence
  Description of Artificial Sequence: Synthetic oligonucleotide
cuggcccuggccgcaccac

SEQ ID NO: 7852 - RNA, 19 nt, Artificial Sequence
  Description of Artificial Sequence: Synthetic oligonucleotide
ucuggcccuggccgcacca

SEQ ID NO: 7853 - RNA, 19 nt, Artificial Sequence
  Description of Artificial Sequence: Synthetic oligonucleotide
aucuggcccuggccgcacc

SEQ ID NO: 7854 - RNA, 19 nt, Artificial Sequence
  Description of Artificial Sequence: Synthetic oligonucleotide
caucuggcccuggccgcac

SEQ ID NO: 7855 - RNA, 19 nt, Artificial Sequence
  Description of Artificial Sequence: Synthetic oligonucleotide
ccaucuggcccuggccgca

SEQ ID NO: 7856 - RNA, 19 nt, Artificial Sequence
  Description of Artificial Sequence: Synthetic oligonucleotide
cccaucuggcccuggccgc

SEQ ID NO: 7857 - RNA, 19 nt, Artificial Sequence
  Description of Artificial Sequence: Synthetic oligonucleotide
ccccaucuggcccuggccg

SEQ ID NO: 7858 - RNA, 19 nt, Artificial Sequence
  Description of Artificial Sequence: Synthetic oligonucleotide
accccaucuggcccuggcc

SEQ ID NO: 7859 - RNA, 19 nt, Artificial Sequence
  Description of Artificial Sequence: Synthetic oligonucleotide
gaccccaucuggcccuggc

SEQ ID NO: 7860 - RNA, 19 nt, Artificial Sequence
  Description of Artificial Sequence: Synthetic oligonucleotide
ggaccccaucuggcccugg

SEQ ID NO: 7861 - RNA, 19 nt, Artificial Sequence
  Description of Artificial Sequence: Synthetic oligonucleotide
gggaccccaucuggcccug

SEQ ID NO: 7862 - RNA, 19 nt, Artificial Sequence
  Description of Artificial Sequence: Synthetic oligonucleotide
ugggaccccaucuggcccu

SEQ ID NO: 7863 - RNA, 19 nt, Artificial Sequence
  Description of Artificial Sequence: Synthetic oligonucleotide
gugggaccccaucuggccc

SEQ ID NO: 7864 - RNA, 19 nt, Artificial Sequence
  Description of Artificial Sequence: Synthetic oligonucleotide
ugugggaccccaucuggcc

SEQ ID NO: 7865 - RNA, 19 nt, Artificial Sequence
  Description of Artificial Sequence: Synthetic oligonucleotide
cugugggaccccaucuggc

SEQ ID NO: 7866 - RNA, 19 nt, Artificial Sequence
  Description of Artificial Sequence: Synthetic oligonucleotide
ucugugggaccccaucugg

SEQ ID NO: 7867 - RNA, 19 nt, Artificial Sequence
  Description of Artificial Sequence: Synthetic oligonucleotide
cucugugggaccccaucug

SEQ ID NO: 7868 - RNA, 19 nt, Artificial Sequence
  Description of Artificial Sequence: Synthetic oligonucleotide
gcucugugggaccccaucu

SEQ ID NO: 7869 - RNA, 19 nt, Artificial Sequence
  Description of Artificial Sequence: Synthetic oligonucleotide
ugcucugugggaccccauc

SEQ ID NO: 7870 - RNA, 19 nt, Artificial Sequence
  Description of Artificial Sequence: Synthetic oligonucleotide
gugcucugugggaccccau

SEQ ID NO: 7871 - RNA, 19 nt, Artificial Sequence
  Description of Artificial Sequence: Synthetic oligonucleotide
cgugcucugugggacccca

SEQ ID NO: 7872 - RNA, 19 nt, Artificial Sequence
  Description of Artificial Sequence: Synthetic oligonucleotide
gcgugcucugugggacccc

SEQ ID NO: 7873 - RNA, 19 nt, Artificial Sequence
  Description of Artificial Sequence: Synthetic oligonucleotide
agcgugcucugugggaccc

SEQ ID NO: 7874 - RNA, 19 nt, Artificial Sequence
  Description of Artificial Sequence: Synthetic oligonucleotide
gagcgugcucugugggacc

SEQ ID NO: 7875 - RNA, 19 nt, Artificial Sequence
  Description of Artificial Sequence: Synthetic oligonucleotide
ggagcgugcucugugggac

SEQ ID NO: 7876 - RNA, 19 nt, Artificial Sequence
  Description of Artificial Sequence: Synthetic oligonucleotide
aggagcgugcucuguggga

SEQ ID NO: 7877 - RNA, 19 nt, Artificial Sequence
  Description of Artificial Sequence: Synthetic oligonucleotide
aaggagcgugcucuguggg

SEQ ID NO: 7878 - RNA, 19 nt, Artificial Sequence
  Description of Artificial Sequence: Synthetic oligonucleotide
caaggagcgugcucugugg

SEQ ID NO: 7879 - RNA, 19 nt, Artificial Sequence
  Description of Artificial Sequence: Synthetic oligonucleotide
ccaaggagcgugcucugug

SEQ ID NO: 7880 - RNA, 19 nt, Artificial Sequence
  Description of Artificial Sequence: Synthetic oligonucleotide
accaaggagcgugcucugu

SEQ ID NO: 7881 - RNA, 19 nt, Artificial Sequence
  Description of Artificial Sequence: Synthetic oligonucleotide
uaccaaggagcgugcucug

SEQ ID NO: 7882 - RNA, 19 nt, Artificial Sequence
  Description of Artificial Sequence: Synthetic oligonucleotide
auaccaaggagcgugcucu

SEQ ID NO: 7883 - RNA, 19 nt, Artificial Sequence
  Description of Artificial Sequence: Synthetic oligonucleotide
gauaccaaggagcgugcuc

SEQ ID NO: 7884 - RNA, 19 nt, Artificial Sequence
  Description of Artificial Sequence: Synthetic oligonucleotide
ggauaccaaggagcgugcu

SEQ ID NO: 7885 - RNA, 19 nt, Artificial Sequence
  Description of Artificial Sequence: Synthetic oligonucleotide
aggauaccaaggagcgugc

SEQ ID NO: 7886 - RNA, 19 nt, Artificial Sequence
  Description of Artificial Sequence: Synthetic oligonucleotide
caggauaccaaggagcgug

SEQ ID NO: 7887 - RNA, 19 nt, Artificial Sequence
  Description of Artificial Sequence: Synthetic oligonucleotide
gcaggauaccaaggagcgu

SEQ ID NO: 7888 - RNA, 19 nt, Artificial Sequence
  Description of Artificial Sequence: Synthetic oligonucleotide
agcaggauaccaaggagcg

SEQ ID NO: 7889 - RNA, 19 nt, Artificial Sequence
  Description of Artificial Sequence: Synthetic oligonucleotide
cagcaggauaccaaggagc

SEQ ID NO: 7890 - RNA, 19 nt, Artificial Sequence
  Description of Artificial Sequence: Synthetic oligonucleotide
gcagcaggauaccaaggag

SEQ ID NO: 7891 - RNA, 19 nt, Artificial Sequence
  Description of Artificial Sequence: Synthetic oligonucleotide
ggcagcaggauaccaagga

SEQ ID NO: 7892 - RNA, 19 nt, Artificial Sequence
  Description of Artificial Sequence: Synthetic oligonucleotide
aggcagcaggauaccaagg

SEQ ID NO: 7893 - RNA, 19 nt, Artificial Sequence
  Description of Artificial Sequence: Synthetic oligonucleotide
aaggcagcaggauaccaag

SEQ ID NO: 7894 - RNA, 19 nt, Artificial Sequence
  Description of Artificial Sequence: Synthetic oligonucleotide
aaaggcagcaggauaccaa

SEQ ID NO: 7895 - RNA, 19 nt, Artificial Sequence
  Description of Artificial Sequence: Synthetic oligonucleotide
caaaggcagcaggauacca

SEQ ID NO: 7896 - RNA, 19 nt, Artificial Sequence
  Description of Artificial Sequence: Synthetic oligonucleotide
gcaaaggcagcaggauacc

SEQ ID NO: 7897 - RNA, 19 nt, Artificial Sequence
  Description of Artificial Sequence: Synthetic oligonucleotide
agcaaaggcagcaggauac

SEQ ID NO: 7898 - RNA, 19 nt, Artificial Sequence
  Description of Artificial Sequence: Synthetic oligonucleotide
cagcaaaggcagcaggaua

SEQ ID NO: 7899 - RNA, 19 nt, Artificial Sequence
  Description of Artificial Sequence: Synthetic oligonucleotide
gcagcaaaggcagcaggau

SEQ ID NO: 7900 - RNA, 19 nt, Artificial Sequence
  Description of Artificial Sequence: Synthetic oligonucleotide
agcagcaaaggcagcagga

SEQ ID NO: 7901 - RNA, 19 nt, Artificial Sequence
  Description of Artificial Sequence: Synthetic oligonucleotide
cagcagcaaaggcagcagg

SEQ ID NO: 7902 - RNA, 19 nt, Artificial Sequence
  Description of Artificial Sequence: Synthetic oligonucleotide
gcagcagcaaaggcagcag

SEQ ID NO: 7903 - RNA, 19 nt, Artificial Sequence
  Description of Artificial Sequence: Synthetic oligonucleotide
agcagcagcaaaggcagca

SEQ ID NO: 7904 - RNA, 19 nt, Artificial Sequence
  Description of Artificial Sequence: Synthetic oligonucleotide
aagcagcagcaaaggcagc

SEQ ID NO: 7905 - RNA, 19 nt, Artificial Sequence
  Description of Artificial Sequence: Synthetic oligonucleotide
caagcagcagcaaaggcag

SEQ ID NO: 7906 - RNA, 19 nt, Artificial Sequence
  Description of Artificial Sequence: Synthetic oligonucleotide
acaagcagcagcaaaggca

SEQ ID NO: 7907 - RNA, 19 nt, Artificial Sequence
  Description of Artificial Sequence: Synthetic oligonucleotide
cacaagcagcagcaaaggc

SEQ ID NO: 7908 - RNA, 19 nt, Artificial Sequence
  Description of Artificial Sequence: Synthetic oligonucleotide
ccacaagcagcagcaaagg

SEQ ID NO: 7909 - RNA, 19 nt, Artificial Sequence
  Description of Artificial Sequence: Synthetic oligonucleotide
gccacaagcagcagcaaag

SEQ ID NO: 7910 - RNA, 19 nt, Artificial Sequence
  Description of Artificial Sequence: Synthetic oligonucleotide
agccacaagcagcagcaaa

SEQ ID NO: 7911 - RNA, 19 nt, Artificial Sequence
  Description of Artificial Sequence: Synthetic oligonucleotide
cagccacaagcagcagcaa

SEQ ID NO: 7912 - RNA, 19 nt, Artificial Sequence
  Description of Artificial Sequence: Synthetic oligonucleotide
gcagccacaagcagcagca

SEQ ID NO: 7913 - RNA, 19 nt, Artificial Sequence
  Description of Artificial Sequence: Synthetic oligonucleotide
ugcagccacaagcagcagc

SEQ ID NO: 7914 - RNA, 19 nt, Artificial Sequence
  Description of Artificial Sequence: Synthetic oligonucleotide
gugcagccacaagcagcag

SEQ ID NO: 7915 - RNA, 19 nt, Artificial Sequence
  Description of Artificial Sequence: Synthetic oligonucleotide
agugcagccacaagcagca

SEQ ID NO: 7916 - RNA, 19 nt, Artificial Sequence
  Description of Artificial Sequence: Synthetic oligonucleotide
cagugcagccacaagcagc

SEQ ID NO: 7917 - RNA, 19 nt, Artificial Sequence
  Description of Artificial Sequence: Synthetic oligonucleotide
ccagugcagccacaagcag

SEQ ID NO: 7918 - RNA, 19 nt, Artificial Sequence
  Description of Artificial Sequence: Synthetic oligonucleotide
gccagugcagccacaagca

SEQ ID NO: 7919 - RNA, 19 nt, Artificial Sequence
  Description of Artificial Sequence: Synthetic oligonucleotide
cgccagugcagccacaagc

SEQ ID NO: 7920 - RNA, 19 nt, Artificial Sequence
  Description of Artificial Sequence: Synthetic oligonucleotide
ucgccagugcagccacaag

SEQ ID NO: 7921 - RNA, 19 nt, Artificial Sequence
  Description of Artificial Sequence: Synthetic oligonucleotide
gucgccagugcagccacaa

SEQ ID NO: 7922 - RNA, 19 nt, Artificial Sequence
  Description of Artificial Sequence: Synthetic oligonucleotide
agucgccagugcagccaca

SEQ ID NO: 7923 - RNA, 19 nt, Artificial Sequence
  Description of Artificial Sequence: Synthetic oligonucleotide
cagucgccagugcagccac

SEQ ID NO: 7924 - RNA, 19 nt, Artificial Sequence
  Description of Artificial Sequence: Synthetic oligonucleotide
gcagucgccagugcagcca

SEQ ID NO: 7925 - RNA, 19 nt, Artificial Sequence
  Description of Artificial Sequence: Synthetic oligonucleotide
ugcagucgccagugcagcc

SEQ ID NO: 7926 - RNA, 19 nt, Artificial Sequence
  Description of Artificial Sequence: Synthetic oligonucleotide
gugcagucgccagugcagc

SEQ ID NO: 7927 - RNA, 19 nt, Artificial Sequence
  Description of Artificial Sequence: Synthetic oligonucleotide
agugcagucgccagugcag

SEQ ID NO: 7928 - RNA, 19 nt, Artificial Sequence
  Description of Artificial Sequence: Synthetic oligonucleotide
cagugcagucgccagugca

SEQ ID NO: 7929 - RNA, 19 nt, Artificial Sequence
  Description of Artificial Sequence: Synthetic oligonucleotide
ccagugcagucgccagugc

SEQ ID NO: 7930 - RNA, 19 nt, Artificial Sequence
  Description of Artificial Sequence: Synthetic oligonucleotide
accagugcagucgccagug

SEQ ID NO: 7931 - RNA, 19 nt, Artificial Sequence
  Description of Artificial Sequence: Synthetic oligonucleotide
gaccagugcagucgccagu

SEQ ID NO: 7932 - RNA, 19 nt, Artificial Sequence
  Description of Artificial Sequence: Synthetic oligonucleotide
agaccagugcagucgccag

SEQ ID NO: 7933 - RNA, 19 nt, Artificial Sequence
  Description of Artificial Sequence: Synthetic oligonucleotide
aagaccagugcagucgcca

SEQ ID NO: 7934 - RNA, 19 nt, Artificial Sequence
  Description of Artificial Sequence: Synthetic oligonucleotide
gaagaccagugcagucgcc

SEQ ID NO: 7935 - RNA, 19 nt, Artificial Sequence
  Description of Artificial Sequence: Synthetic oligonucleotide
ugaagaccagugcagucgc

SEQ ID NO: 7936 - RNA, 19 nt, Artificial Sequence
  Description of Artificial Sequence: Synthetic oligonucleotide
cugaagaccagugcagucg

SEQ ID NO: 7937 - RNA, 19 nt, Artificial Sequence
  Description of Artificial Sequence: Synthetic oligonucleotide
gcugaagaccagugcaguc

SEQ ID NO: 7938 - RNA, 19 nt, Artificial Sequence
  Description of Artificial Sequence: Synthetic oligonucleotide
agcugaagaccagugcagu

SEQ ID NO: 7939 - RNA, 19 nt, Artificial Sequence
  Description of Artificial Sequence: Synthetic oligonucleotide
uagcugaagaccagugcag

SEQ ID NO: 7940 - RNA, 19 nt, Artificial Sequence
  Description of Artificial Sequence: Synthetic oligonucleotide
guagcugaagaccagugca

SEQ ID NO: 7941 - RNA, 19 nt, Artificial Sequence
  Description of Artificial Sequence: Synthetic oligonucleotide
aguagcugaagaccagugc

SEQ ID NO: 7942 - RNA, 19 nt, Artificial Sequence
  Description of Artificial Sequence: Synthetic oligonucleotide
caguagcugaagaccagug

SEQ ID NO: 7943 - RNA, 19 nt, Artificial Sequence
  Description of Artificial Sequence: Synthetic oligonucleotide
ccaguagcugaagaccagu

SEQ ID NO: 7944 - RNA, 19 nt, Artificial Sequence
  Description of Artificial Sequence: Synthetic oligonucleotide
accaguagcugaagaccag

SEQ ID NO: 7945 - RNA, 19 nt, Artificial Sequence
  Description of Artificial Sequence: Synthetic oligonucleotide
caccaguagcugaagacca

SEQ ID NO: 7946 - RNA, 19 nt, Artificial Sequence
  Description of Artificial Sequence: Synthetic oligonucleotide
ccaccaguagcugaagacc

SEQ ID NO: 7947 - RNA, 19 nt, Artificial Sequence
  Description of Artificial Sequence: Synthetic oligonucleotide
gccaccaguagcugaagac

SEQ ID NO: 7948 - RNA, 19 nt, Artificial Sequence
  Description of Artificial Sequence: Synthetic oligonucleotide
cgccaccaguagcugaaga

SEQ ID NO: 7949 - RNA, 19 nt, Artificial Sequence
  Description of Artificial Sequence: Synthetic oligonucleotide
ccgccaccaguagcugaag

SEQ ID NO: 7950 - RNA, 19 nt, Artificial Sequence
  Description of Artificial Sequence: Synthetic oligonucleotide
uccgccaccaguagcugaa

SEQ ID NO: 7951 - RNA, 19 nt, Artificial Sequence
  Description of Artificial Sequence: Synthetic oligonucleotide
cuccgccaccaguagcuga

SEQ ID NO: 7952 - RNA, 19 nt, Artificial Sequence
  Description of Artificial Sequence: Synthetic oligonucleotide
ccuccgccaccaguagcug

SEQ ID NO: 7953 - RNA, 19 nt, Artificial Sequence
  Description of Artificial Sequence: Synthetic oligonucleotide
uccuccgccaccaguagcu

SEQ ID NO: 7954 - RNA, 19 nt, Artificial Sequence
  Description of Artificial Sequence: Synthetic oligonucleotide
uuccuccgccaccaguagc

SEQ ID NO: 7955 - RNA, 19 nt, Artificial Sequence
  Description of Artificial Sequence: Synthetic oligonucleotide
cuuccuccgccaccaguag

SEQ ID NO: 7956 - RNA, 19 nt, Artificial Sequence
  Description of Artificial Sequence: Synthetic oligonucleotide
gcuuccuccgccaccagua

SEQ ID NO: 7957 - RNA, 19 nt, Artificial Sequence
  Description of Artificial Sequence: Synthetic oligonucleotide
ugcuuccuccgccaccagu

SEQ ID NO: 7958 - RNA, 19 nt, Artificial Sequence
  Description of Artificial Sequence: Synthetic oligonucleotide
cugcuuccuccgccaccag

SEQ ID NO: 7959 - RNA, 19 nt, Artificial Sequence
  Description of Artificial Sequence: Synthetic oligonucleotide
gcugcuuccuccgccacca

SEQ ID NO: 7960 - RNA, 19 nt, Artificial Sequence
  Description of Artificial Sequence: Synthetic oligonucleotide
agcugcuuccuccgccacc

SEQ ID NO: 7961 - RNA, 19 nt, Artificial Sequence
  Description of Artificial Sequence: Synthetic oligonucleotide
uagcugcuuccuccgccac

SEQ ID NO: 7962 - RNA, 19 nt, Artificial Sequence
  Description of Artificial Sequence: Synthetic oligonucleotide
cuagcugcuuccuccgcca

SEQ ID NO: 7963 - RNA, 19 nt, Artificial Sequence
  Description of Artificial Sequence: Synthetic oligonucleotide
acuagcugcuuccuccgcc

SEQ ID NO: 7964 - RNA, 19 nt, Artificial Sequence
  Description of Artificial Sequence: Synthetic oligonucleotide
aacuagcugcuuccuccgc

SEQ ID NO: 7965 - RNA, 19 nt, Artificial Sequence
  Description of Artificial Sequence: Synthetic oligonucleotide
gaacuagcugcuuccuccg

SEQ ID NO: 7966 - RNA, 19 nt, Artificial Sequence
  Description of Artificial Sequence: Synthetic oligonucleotide
agaacuagcugcuuccucc

SEQ ID NO: 7967 - RNA, 19 nt, Artificial Sequence
  Description of Artificial Sequence: Synthetic oligonucleotide
aagaacuagcugcuuccuc

SEQ ID NO: 7968 - RNA, 19 nt, Artificial Sequence
  Description of Artificial Sequence: Synthetic oligonucleotide
gaagaacuagcugcuuccu

SEQ ID NO: 7969 - RNA, 19 nt, Artificial Sequence
  Description of Artificial Sequence: Synthetic oligonucleotide
ggaagaacuagcugcuucc

SEQ ID NO: 7970 - RNA, 19 nt, Artificial Sequence
  Description of Artificial Sequence: Synthetic oligonucleotide
aggaagaacuagcugcuuc

SEQ ID NO: 7971 - RNA, 19 nt, Artificial Sequence
  Description of Artificial Sequence: Synthetic oligonucleotide
gaggaagaacuagcugcuu

SEQ ID NO: 7972 - RNA, 19 nt, Artificial Sequence
  Description of Artificial Sequence: Synthetic oligonucleotide
ggaggaagaacuagcugcu

SEQ ID NO: 7973 - RNA, 19 nt, Artificial Sequence
  Description of Artificial Sequence: Synthetic oligonucleotide
gggaggaagaacuagcugc

SEQ ID NO: 7974 - RNA, 19 nt, Artificial Sequence
  Description of Artificial Sequence: Synthetic oligonucleotide
ugggaggaagaacuagcug

SEQ ID NO: 7975 - RNA, 19 nt, Artificial Sequence
  Description of Artificial Sequence: Synthetic oligonucleotide
uugggaggaagaacuagcu

SEQ ID NO: 7976 - RNA, 19 nt, Artificial Sequence
  Description of Artificial Sequence: Synthetic oligonucleotide
guugggaggaagaacuagc

SEQ ID NO: 7977 - RNA, 19 nt, Artificial Sequence
  Description of Artificial Sequence: Synthetic oligonucleotide
gguugggaggaagaacuag

SEQ ID NO: 7978 - RNA, 19 nt, Artificial Sequence
  Description of Artificial Sequence: Synthetic oligonucleotide
agguugggaggaagaacua

SEQ ID NO: 7979 - RNA, 19 nt, Artificial Sequence
  Description of Artificial Sequence: Synthetic oligonucleotide
cagguugggaggaagaacu

SEQ ID NO: 7980 - RNA, 19 nt, Artificial Sequence
  Description of Artificial Sequence: Synthetic oligonucleotide
ucagguugggaggaagaac

SEQ ID NO: 7981 - RNA, 19 nt, Artificial Sequence
  Description of Artificial Sequence: Synthetic oligonucleotide
uucagguugggaggaagaa

SEQ ID NO: 7982 - RNA, 19 nt, Artificial Sequence
  Description of Artificial Sequence: Synthetic oligonucleotide
auucagguugggaggaaga

SEQ ID NO: 7983 - RNA, 19 nt, Artificial Sequence
  Description of Artificial Sequence: Synthetic oligonucleotide
cauucagguugggaggaag

SEQ ID NO: 7984 - RNA, 19 nt, Artificial Sequence
  Description of Artificial Sequence: Synthetic oligonucleotide
ucauucagguugggaggaa

SEQ ID NO: 7985 - RNA, 19 nt, Artificial Sequence
  Description of Artificial Sequence: Synthetic oligonucleotide
gucauucagguugggagga

SEQ ID NO: 7986 - RNA, 19 nt, Artificial Sequence
  Description of Artificial Sequence: Synthetic oligonucleotide
ggucauucagguugggagg

SEQ ID NO: 7987 - RNA, 19 nt, Artificial Sequence
  Description of Artificial Sequence: Synthetic oligonucleotide
aggucauucagguugggag

SEQ ID NO: 7988 - RNA, 19 nt, Artificial Sequence
  Description of Artificial Sequence: Synthetic oligonucleotide
caggucauucagguuggga

SEQ ID NO: 7989 - RNA, 19 nt, Artificial Sequence
  Description of Artificial Sequence: Synthetic oligonucleotide
ccaggucauucagguuggg

SEQ ID NO: 7990 - RNA, 19 nt, Artificial Sequence
  Description of Artificial Sequence: Synthetic oligonucleotide
gccaggucauucagguugg

SEQ ID NO: 7991 - RNA, 19 nt, Artificial Sequence
  Description of Artificial Sequence: Synthetic oligonucleotide
ugccaggucauucagguug

SEQ ID NO: 7992 - RNA, 19 nt, Artificial Sequence
  Description of Artificial Sequence: Synthetic oligonucleotide
augccaggucauucagguu

SEQ ID NO: 7993 - RNA, 19 nt, Artificial Sequence
  Description of Artificial Sequence: Synthetic oligonucleotide
gaugccaggucauucaggu

SEQ ID NO: 7994 - RNA, 19 nt, Artificial Sequence
  Description of Artificial Sequence: Synthetic oligonucleotide
ggaugccaggucauucagg

SEQ ID NO: 7995 - RNA, 19 nt, Artificial Sequence
  Description of Artificial Sequence: Synthetic oligonucleotide
gggaugccaggucauucag

SEQ ID NO: 7996 - RNA, 19 nt, Artificial Sequence
  Description of Artificial Sequence: Synthetic oligonucleotide
agggaugccaggucauuca

SEQ ID NO: 7997 - RNA, 19 nt, Artificial Sequence
  Description of Artificial Sequence: Synthetic oligonucleotide
cagggaugccaggucauuc

SEQ ID NO: 7998 - RNA, 19 nt, Artificial Sequence
  Description of Artificial Sequence: Synthetic oligonucleotide
ccagggaugccaggucauu

SEQ ID NO: 7999 - RNA, 19 nt, Artificial Sequence
  Description of Artificial Sequence: Synthetic oligonucleotide
uccagggaugccaggucau

SEQ ID NO: 8000 - RNA, 19 nt, Artificial Sequence
  Description of Artificial Sequence: Synthetic oligonucleotide
guccagggaugccagguca

SEQ ID NO: 8001 - RNA, 19 nt, Artificial Sequence
  Description of Artificial Sequence: Synthetic oligonucleotide
gguccagggaugccagguc

SEQ ID NO: 8002 - RNA, 19 nt, Artificial Sequence
  Description of Artificial Sequence: Synthetic oligonucleotide
ugguccagggaugccaggu

SEQ ID NO: 8003 - RNA, 19 nt, Artificial Sequence
  Description of Artificial Sequence: Synthetic oligonucleotide
cugguccagggaugccagg

SEQ ID NO: 8004 - RNA, 19 nt, Artificial Sequence
  Description of Artificial Sequence: Synthetic oligonucleotide
ucugguccagggaugccag

SEQ ID NO: 8005 - RNA, 19 nt, Artificial Sequence
  Description of Artificial Sequence: Synthetic oligonucleotide
gucugguccagggaugcca

SEQ ID NO: 8006 - RNA, 19 nt, Artificial Sequence
  Description of Artificial Sequence: Synthetic oligonucleotide
agucugguccagggaugcc

SEQ ID NO: 8007 - RNA, 19 nt, Artificial Sequence
  Description of Artificial Sequence: Synthetic oligonucleotide
cagucugguccagggaugc

SEQ ID NO: 8008 - RNA, 19 nt, Artificial Sequence
  Description of Artificial Sequence: Synthetic oligonucleotide
gcagucugguccagggaug

SEQ ID NO: 8009 - RNA, 19 nt, Artificial Sequence
  Description of Artificial Sequence: Synthetic oligonucleotide
agcagucugguccagggau

SEQ ID NO: 8010 - RNA, 19 nt, Artificial Sequence
  Description of Artificial Sequence: Synthetic oligonucleotide
cagcagucugguccaggga

SEQ ID NO: 8011 - RNA, 19 nt, Artificial Sequence
  Description of Artificial Sequence: Synthetic oligonucleotide
ccagcagucugguccaggg

SEQ ID NO: 8012 - RNA, 19 nt, Artificial Sequence
  Description of Artificial Sequence: Synthetic oligonucleotide
uccagcagucugguccagg

SEQ ID NO: 8013 - RNA, 19 nt, Artificial Sequence
  Description of Artificial Sequence: Synthetic oligonucleotide
cuccagcagucugguccag

SEQ ID NO: 8014 - RNA, 19 nt, Artificial Sequence
  Description of Artificial Sequence: Synthetic oligonucleotide
gcuccagcagucuggucca

SEQ ID NO: 8015 - RNA, 19 nt, Artificial Sequence
  Description of Artificial Sequence: Synthetic oligonucleotide
ggcuccagcagucuggucc

SEQ ID NO: 8016 - RNA, 19 nt, Artificial Sequence
  Description of Artificial Sequence: Synthetic oligonucleotide
uggcuccagcagucugguc

SEQ ID NO: 8017 - RNA, 19 nt, Artificial Sequence
  Description of Artificial Sequence: Synthetic oligonucleotide
guggcuccagcagucuggu

SEQ ID NO: 8018 - RNA, 19 nt, Artificial Sequence
  Description of Artificial Sequence: Synthetic oligonucleotide
uguggcuccagcagucugg

SEQ ID NO: 8019 - RNA, 19 nt, Artificial Sequence
  Description of Artificial Sequence: Synthetic oligonucleotide
guguggcuccagcagucug

SEQ ID NO: 8020 - RNA, 19 nt, Artificial Sequence
  Description of Artificial Sequence: Synthetic oligonucleotide
gguguggcuccagcagucu

SEQ ID NO: 8021 - RNA, 19 nt, Artificial Sequence
  Description of Artificial Sequence: Synthetic oligonucleotide
ggguguggcuccagcaguc

SEQ ID NO: 8022 - RNA, 19 nt, Artificial Sequence
  Description of Artificial Sequence: Synthetic oligonucleotide
gggguguggcuccagcagu

SEQ ID NO: 8023 - RNA, 19 nt, Artificial Sequence
  Description of Artificial Sequence: Synthetic oligonucleotide
agggguguggcuccagcag

SEQ ID NO: 8024 - RNA, 19 nt, Artificial Sequence
  Description of Artificial Sequence: Synthetic oligonucleotide
cagggguguggcuccagca

SEQ ID NO: 8025 - RNA, 19 nt, Artificial Sequence
  Description of Artificial Sequence: Synthetic oligonucleotide
gcagggguguggcuccagc

SEQ ID NO: 8026 - RNA, 19 nt, Artificial Sequence
  Description of Artificial Sequence: Synthetic oligonucleotide
ggcagggguguggcuccag

SEQ ID NO: 8027 - RNA, 19 nt, Artificial Sequence
  Description of Artificial Sequence: Synthetic oligonucleotide
aggcagggguguggcucca

SEQ ID NO: 8028 - RNA, 19 nt, Artificial Sequence
  Description of Artificial Sequence: Synthetic oligonucleotide
uaggcagggguguggcucc

SEQ ID NO: 8029 - RNA, 19 nt, Artificial Sequence
  Description of Artificial Sequence: Synthetic oligonucleotide
auaggcagggguguggcuc

SEQ ID NO: 8030 - RNA, 19 nt, Artificial Sequence
  Description of Artificial Sequence: Synthetic oligonucleotide
aauaggcagggguguggcu

SEQ ID NO: 8031 - RNA, 19 nt, Artificial Sequence
  Description of Artificial Sequence: Synthetic oligonucleotide
gaauaggcagggguguggc

SEQ ID NO: 8032 - RNA, 19 nt, Artificial Sequence
  Description of Artificial Sequence: Synthetic oligonucleotide
agaauaggcaggggugugg

SEQ ID NO: 8033 - RNA, 19 nt, Artificial Sequence
  Description of Artificial Sequence: Synthetic oligonucleotide
cagaauaggcaggggugug

SEQ ID NO: 8034 - RNA, 19 nt, Artificial Sequence
  Description of Artificial Sequence: Synthetic oligonucleotide
acagaauaggcaggggugu

SEQ ID NO: 8035 - RNA, 19 nt, Artificial Sequence
  Description of Artificial Sequence: Synthetic oligonucleotide
uacagaauaggcaggggug

SEQ ID NO: 8036 - RNA, 19 nt, Artificial Sequence
  Description of Artificial Sequence: Synthetic oligonucleotide
guacagaauaggcaggggu

SEQ ID NO: 8037 - RNA, 19 nt, Artificial Sequence
  Description of Artificial Sequence: Synthetic oligonucleotide
aguacagaauaggcagggg

SEQ ID NO: 8038 - RNA, 19 nt, Artificial Sequence
  Description of Artificial Sequence: Synthetic oligonucleotide
gaguacagaauaggcaggg

SEQ ID NO: 8039 - RNA, 19 nt, Artificial Sequence
  Description of Artificial Sequence: Synthetic oligonucleotide
cgaguacagaauaggcagg

SEQ ID NO: 8040 - RNA, 19 nt, Artificial Sequence
  Description of Artificial Sequence: Synthetic oligonucleotide
ccgaguacagaauaggcag

SEQ ID NO: 8041 - RNA, 19 nt, Artificial Sequence
  Description of Artificial Sequence: Synthetic oligonucleotide
cccgaguacagaauaggca

SEQ ID NO: 8042 - RNA, 19 nt, Artificial Sequence
  Description of Artificial Sequence: Synthetic oligonucleotide
gcccgaguacagaauaggc

SEQ ID NO: 8043 - RNA, 19 nt, Artificial Sequence
  Description of Artificial Sequence: Synthetic oligonucleotide
agcccgaguacagaauagg

SEQ ID NO: 8044 - RNA, 19 nt, Artificial Sequence
  Description of Artificial Sequence: Synthetic oligonucleotide
gagcccgaguacagaauag

SEQ ID NO: 8045 - RNA, 19 nt, Artificial Sequence
  Description of Artificial Sequence: Synthetic oligonucleotide
agagcccgaguacagaaua

SEQ ID NO: 8046 - RNA, 19 nt, Artificial Sequence
  Description of Artificial Sequence: Synthetic oligonucleotide
cagagcccgaguacagaau

SEQ ID NO: 8047 - RNA, 19 nt, Artificial Sequence
  Description of Artificial Sequence: Synthetic oligonucleotide
ucagagcccgaguacagaa

SEQ ID NO: 8048 - RNA, 19 nt, Artificial Sequence
  Description of Artificial Sequence: Synthetic oligonucleotide
gucagagcccgaguacaga

SEQ ID NO: 8049 - RNA, 19 nt, Artificial Sequence
  Description of Artificial Sequence: Synthetic oligonucleotide
agucagagcccgaguacag

SEQ ID NO: 8050 - RNA, 19 nt, Artificial Sequence
  Description of Artificial Sequence: Synthetic oligonucleotide
uagucagagcccgaguaca

SEQ ID NO: 8051 - RNA, 19 nt, Artificial Sequence
  Description of Artificial Sequence: Synthetic oligonucleotide
guagucagagcccgaguac

SEQ ID NO: 8052 - RNA, 19 nt, Artificial Sequence
  Description of Artificial Sequence: Synthetic oligonucleotide
uguagucagagcccgagua

SEQ ID NO: 8053 - RNA, 19 nt, Artificial Sequence
  Description of Artificial Sequence: Synthetic oligonucleotide
cuguagucagagcccgagu

SEQ ID NO: 8054 - RNA, 19 nt, Artificial Sequence
  Description of Artificial Sequence: Synthetic oligonucleotide
ucuguagucagagcccgag

SEQ ID NO: 8055 - RNA, 19 nt, Artificial Sequence
  Description of Artificial Sequence: Synthetic oligonucleotide
uucuguagucagagcccga

SEQ ID NO: 8056 - RNA, 19 nt, Artificial Sequence
  Description of Artificial Sequence: Synthetic oligonucleotide
cuucuguagucagagcccg

SEQ ID NO: 8057 - RNA, 19 nt, Artificial Sequence
  Description of Artificial Sequence: Synthetic oligonucleotide
acuucuguagucagagccc

SEQ ID NO: 8058 - RNA, 19 nt, Artificial Sequence
  Description of Artificial Sequence: Synthetic oligonucleotide
cacuucuguagucagagcc

SEQ ID NO: 8059 - RNA, 19 nt, Artificial Sequence
  Description of Artificial Sequence: Synthetic oligonucleotide
ccacuucuguagucagagc

SEQ ID NO: 8060 - RNA, 19 nt, Artificial Sequence
  Description of Artificial Sequence: Synthetic oligonucleotide
gccacuucuguagucagag

SEQ ID NO: 8061 - RNA, 19 nt, Artificial Sequence
  Description of Artificial Sequence: Synthetic oligonucleotide
ggccacuucuguagucaga

SEQ ID NO: 8062 - RNA, 19 nt, Artificial Sequence
  Description of Artificial Sequence: Synthetic oligonucleotide
aggccacuucuguagucag

SEQ ID NO: 8063 - RNA, 19 nt, Artificial Sequence
  Description of Artificial Sequence: Synthetic oligonucleotide
aaggccacuucuguaguca

SEQ ID NO: 8064 - RNA, 19 nt, Artificial Sequence
  Description of Artificial Sequence: Synthetic oligonucleotide
caaggccacuucuguaguc

SEQ ID NO: 8065 - RNA, 19 nt, Artificial Sequence
  Description of Artificial Sequence: Synthetic oligonucleotide
gcaaggccacuucuguagu

SEQ ID NO: 8066 - RNA, 19 nt, Artificial Sequence
  Description of Artificial Sequence: Synthetic oligonucleotide
ugcaaggccacuucuguag

SEQ ID NO: 8067 - RNA, 19 nt, Artificial Sequence
  Description of Artificial Sequence: Synthetic oligonucleotide
gugcaaggccacuucugua

SEQ ID NO: 8068 - RNA, 19 nt, Artificial Sequence
  Description of Artificial Sequence: Synthetic oligonucleotide
agugcaaggccacuucugu

SEQ ID NO: 8069 - RNA, 19 nt, Artificial Sequence
  Description of Artificial Sequence: Synthetic oligonucleotide
gagugcaaggccacuucug

SEQ ID NO: 8070 - RNA, 19 nt, Artificial Sequence
  Description of Artificial Sequence: Synthetic oligonucleotide
ggagugcaaggccacuucu

SEQ ID NO: 8071 - RNA, 19 nt, Artificial Sequence
  Description of Artificial Sequence: Synthetic oligonucleotide
gggagugcaaggccacuuc

SEQ ID NO: 8072 - RNA, 19 nt, Artificial Sequence
  Description of Artificial Sequence: Synthetic oligonucleotide
agggagugcaaggccacuu

SEQ ID NO: 8073 - RNA, 19 nt, Artificial Sequence
  Description of Artificial Sequence: Synthetic oligonucleotide
cagggagugcaaggccacu

SEQ ID NO: 8074 - RNA, 19 nt, Artificial Sequence
  Description of Artificial Sequence: Synthetic oligonucleotide
gcagggagugcaaggccac

SEQ ID NO: 8075 - RNA, 19 nt, Artificial Sequence
  Description of Artificial Sequence: Synthetic oligonucleotide
ggcagggagugcaaggcca

SEQ ID NO: 8076 - RNA, 19 nt, Artificial Sequence
  Description of Artificial Sequence: Synthetic oligonucleotide
uggcagggagugcaaggcc

SEQ ID NO: 8077 - RNA, 19 nt, Artificial Sequence
  Description of Artificial Sequence: Synthetic oligonucleotide
auggcagggagugcaaggc

SEQ ID NO: 8078 - RNA, 19 nt, Artificial Sequence
  Description of Artificial Sequence: Synthetic oligonucleotide
aauggcagggagugcaagg

SEQ ID NO: 8079 - RNA, 19 nt, Artificial Sequence
  Description of Artificial Sequence: Synthetic oligonucleotide
caauggcagggagugcaag

SEQ ID NO: 8080 - RNA, 19 nt, Artificial Sequence
  Description of Artificial Sequence: Synthetic oligonucleotide
ucaauggcagggagugcaa

SEQ ID NO: 8081 - RNA, 19 nt, Artificial Sequence
  Description of Artificial Sequence: Synthetic oligonucleotide
aucaauggcagggagugca

SEQ ID NO: 8082 - RNA, 19 nt, Artificial Sequence
  Description of Artificial Sequence: Synthetic oligonucleotide
caucaauggcagggagugc

SEQ ID NO: 8083 - RNA, 19 nt, Artificial Sequence
  Description of Artificial Sequence: Synthetic oligonucleotide
ccaucaauggcagggagug

SEQ ID NO: 8084 - RNA, 19 nt, Artificial Sequence
  Description of Artificial Sequence: Synthetic oligonucleotide
accaucaauggcagggagu

SEQ ID NO: 8085 - RNA, 19 nt, Artificial Sequence
  Description of Artificial Sequence: Synthetic oligonucleotide
gaccaucaauggcagggag

SEQ ID NO: 8086 - RNA, 19 nt, Artificial Sequence
  Description of Artificial Sequence: Synthetic oligonucleotide
agaccaucaauggcaggga

SEQ ID NO: 8087 - RNA, 19 nt, Artificial Sequence
  Description of Artificial Sequence: Synthetic oligonucleotide
cagaccaucaauggcaggg

SEQ ID NO: 8088 - RNA, 19 nt, Artificial Sequence
  Description of Artificial Sequence: Synthetic oligonucleotide
ccagaccaucaauggcagg

SEQ ID NO: 8089 - RNA, 19 nt, Artificial Sequence
  Description of Artificial Sequence: Synthetic oligonucleotide
uccagaccaucaauggcag

SEQ ID NO: 8090 - RNA, 19 nt, Artificial Sequence
  Description of Artificial Sequence: Synthetic oligonucleotide
auccagaccaucaauggca

SEQ ID NO: 8091 - RNA, 19 nt, Artificial Sequence
  Description of Artificial Sequence: Synthetic oligonucleotide
aauccagaccaucaauggc

SEQ ID NO: 8092 - RNA, 19 nt, Artificial Sequence
  Description of Artificial Sequence: Synthetic oligonucleotide
gaauccagaccaucaaugg

SEQ ID NO: 8093 - RNA, 19 nt, Artificial Sequence
  Description of Artificial Sequence: Synthetic oligonucleotide
ggaauccagaccaucaaug

SEQ ID NO: 8094 - RNA, 19 nt, Artificial Sequence
  Description of Artificial Sequence: Synthetic oligonucleotide
uggaauccagaccaucaau

SEQ ID NO: 8095 - RNA, 19 nt, Artificial Sequence
  Description of Artificial Sequence: Synthetic oligonucleotide
guggaauccagaccaucaa

SEQ ID NO: 8096 - RNA, 19 nt, Artificial Sequence
  Description of Artificial Sequence: Synthetic oligonucleotide
gguggaauccagaccauca

SEQ ID NO: 8097 - RNA, 19 nt, Artificial Sequence
  Description of Artificial Sequence: Synthetic oligonucleotide
ugguggaauccagaccauc

SEQ ID NO: 8098 - RNA, 19 nt, Artificial Sequence
  Description of Artificial Sequence: Synthetic oligonucleotide
gugguggaauccagaccau

SEQ ID NO: 8099 - RNA, 19 nt, Artificial Sequence
  Description of Artificial Sequence: Synthetic oligonucleotide
agugguggaauccagacca

SEQ ID NO: 8100 - RNA, 19 nt, Artificial Sequence
  Description of Artificial Sequence: Synthetic oligonucleotide
aagugguggaauccagacc

SEQ ID NO: 8101 - RNA, 19 nt, Artificial Sequence
  Description of Artificial Sequence: Synthetic oligonucleotide
caagugguggaauccagac

SEQ ID NO: 8102 - RNA, 19 nt, Artificial Sequence
  Description of Artificial Sequence: Synthetic oligonucleotide
acaagugguggaauccaga

SEQ ID NO: 8103 - RNA, 19 nt, Artificial Sequence
  Description of Artificial Sequence: Synthetic oligonucleotide
cacaagugguggaauccag

SEQ ID NO: 8104 - RNA, 19 nt, Artificial Sequence
  Description of Artificial Sequence: Synthetic oligonucleotide
acacaagugguggaaucca

SEQ ID NO: 8105 - RNA, 19 nt, Artificial Sequence
  Description of Artificial Sequence: Synthetic oligonucleotide
gacacaagugguggaaucc

SEQ ID NO: 8106 - RNA, 19 nt, Artificial Sequence
  Description of Artificial Sequence: Synthetic oligonucleotide
ggacacaagugguggaauc

SEQ ID NO: 8107 - RNA, 19 nt, Artificial Sequence
  Description of Artificial Sequence: Synthetic oligonucleotide
uggacacaagugguggaau

SEQ ID NO: 8108 - RNA, 19 nt, Artificial Sequence
  Description of Artificial Sequence: Synthetic oligonucleotide
auggacacaagugguggaa

SEQ ID NO: 8109 - RNA, 19 nt, Artificial Sequence
  Description of Artificial Sequence: Synthetic oligonucleotide
cauggacacaaguggugga

SEQ ID NO: 8110 - RNA, 19 nt, Artificial Sequence
  Description of Artificial Sequence: Synthetic oligonucleotide
ccauggacacaaguggugg

SEQ ID NO: 8111 - RNA, 19 nt, Artificial Sequence
  Description of Artificial Sequence: Synthetic oligonucleotide
uccauggacacaaguggug

SEQ ID NO: 8112 - RNA, 19 nt, Artificial Sequence
  Description of Artificial Sequence: Synthetic oligonucleotide
cuccauggacacaaguggu

SEQ ID NO: 8113 - RNA, 19 nt, Artificial Sequence
  Description of Artificial Sequence: Synthetic oligonucleotide
gcuccauggacacaagugg

SEQ ID NO: 8114 - RNA, 19 nt, Artificial Sequence
  Description of Artificial Sequence: Synthetic oligonucleotide
ugcuccauggacacaagug

SEQ ID NO: 8115 - RNA, 19 nt, Artificial Sequence
  Description of Artificial Sequence: Synthetic oligonucleotide
augcuccauggacacaagu

SEQ ID NO: 8116 - RNA, 19 nt, Artificial Sequence
  Description of Artificial Sequence: Synthetic oligonucleotide
gaugcuccauggacacaag

SEQ ID NO: 8117 - RNA, 19 nt, Artificial Sequence
  Description of Artificial Sequence: Synthetic oligonucleotide
ggaugcuccauggacacaa

SEQ ID NO: 8118 - RNA, 19 nt, Artificial Sequence
  Description of Artificial Sequence: Synthetic oligonucleotide
aggaugcuccauggacaca

SEQ ID NO: 8119 - RNA, 19 nt, Artificial Sequence
  Description of Artificial Sequence: Synthetic oligonucleotide
aaggaugcuccauggacac

SEQ ID NO: 8120 - RNA, 19 nt, Artificial Sequence
  Description of Artificial Sequence: Synthetic oligonucleotide
gaaggaugcuccauggaca

SEQ ID NO: 8121 - RNA, 19 nt, Artificial Sequence
  Description of Artificial Sequence: Synthetic oligonucleotide
agaaggaugcuccauggac

SEQ ID NO: 8122 - RNA, 19 nt, Artificial Sequence
  Description of Artificial Sequence: Synthetic oligonucleotide
gagaaggaugcuccaugga

SEQ ID NO: 8123 - RNA, 19 nt, Artificial Sequence
  Description of Artificial Sequence: Synthetic oligonucleotide
ggagaaggaugcuccaugg

SEQ ID NO: 8124 - RNA, 19 nt, Artificial Sequence
  Description of Artificial Sequence: Synthetic oligonucleotide
cggagaaggaugcuccaug

SEQ ID NO: 8125 - RNA, 19 nt, Artificial Sequence
  Description of Artificial Sequence: Synthetic oligonucleotide
ucggagaaggaugcuccau

SEQ ID NO: 8126 - RNA, 19 nt, Artificial Sequence
  Description of Artificial Sequence: Synthetic oligonucleotide
aucggagaaggaugcucca

SEQ ID NO: 8127 - RNA, 19 nt, Artificial Sequence
  Description of Artificial Sequence: Synthetic oligonucleotide
uaucggagaaggaugcucc

SEQ ID NO: 8128 - RNA, 19 nt, Artificial Sequence
  Description of Artificial Sequence: Synthetic oligonucleotide
cuaucggagaaggaugcuc

SEQ ID NO: 8129 - RNA, 19 nt, Artificial Sequence
  Description of Artificial Sequence: Synthetic oligonucleotide
acuaucggagaaggaugcu

SEQ ID NO: 8130 - RNA, 19 nt, Artificial Sequence
  Description of Artificial Sequence: Synthetic oligonucleotide
cacuaucggagaaggaugc

SEQ ID NO: 8131 - RNA, 19 nt, Artificial Sequence
  Description of Artificial Sequence: Synthetic oligonucleotide
ucacuaucggagaaggaug

SEQ ID NO: 8132 - RNA, 19 nt, Artificial Sequence
  Description of Artificial Sequence: Synthetic oligonucleotide
uucacuaucggagaaggau

SEQ ID NO: 8133 - RNA, 19 nt, Artificial Sequence
  Description of Artificial Sequence: Synthetic oligonucleotide
cuucacuaucggagaagga

SEQ ID NO: 8134 - RNA, 19 nt, Artificial Sequence
  Description of Artificial Sequence: Synthetic oligonucleotide
ucuucacuaucggagaagg

SEQ ID NO: 8135 - RNA, 19 nt, Artificial Sequence
  Description of Artificial Sequence: Synthetic oligonucleotide
aucuucacuaucggagaag

SEQ ID NO: 8136 - RNA, 19 nt, Artificial Sequence
  Description of Artificial Sequence: Synthetic oligonucleotide
caucuucacuaucggagaa

SEQ ID NO: 8137 - RNA, 19 nt, Artificial Sequence
  Description of Artificial Sequence: Synthetic oligonucleotide
ucaucuucacuaucggaga

SEQ ID NO: 8138 - RNA, 19 nt, Artificial Sequence
  Description of Artificial Sequence: Synthetic oligonucleotide
uucaucuucacuaucggag

SEQ ID NO: 8139 - RNA, 19 nt, Artificial Sequence
  Description of Artificial Sequence: Synthetic oligonucleotide
auucaucuucacuaucgga

SEQ ID NO: 8140 - RNA, 19 nt, Artificial Sequence
  Description of Artificial Sequence: Synthetic oligonucleotide
gauucaucuucacuaucgg

SEQ ID NO: 8141 - RNA, 19 nt, Artificial Sequence
  Description of Artificial Sequence: Synthetic oligonucleotide
ggauucaucuucacuaucg

SEQ ID NO: 8142 - RNA, 19 nt, Artificial Sequence
  Description of Artificial Sequence: Synthetic oligonucleotide
aggauucaucuucacuauc

SEQ ID NO: 8143 - RNA, 19 nt, Artificial Sequence
  Description of Artificial Sequence: Synthetic oligonucleotide
caggauucaucuucacuau

SEQ ID NO: 8144 - RNA, 19 nt, Artificial Sequence
  Description of Artificial Sequence: Synthetic oligonucleotide
acaggauucaucuucacua

SEQ ID NO: 8145 - RNA, 19 nt, Artificial Sequence
  Description of Artificial Sequence: Synthetic oligonucleotide
cacaggauucaucuucacu

SEQ ID NO: 8146 - RNA, 19 nt, Artificial Sequence
  Description of Artificial Sequence: Synthetic oligonucleotide
acacaggauucaucuucac

SEQ ID NO: 8147 - RNA, 19 nt, Artificial Sequence
  Description of Artificial Sequence: Synthetic oligonucleotide
cacacaggauucaucuuca

SEQ ID NO: 8148 - RNA, 19 nt, Artificial Sequence
  Description of Artificial Sequence: Synthetic oligonucleotide
gcacacaggauucaucuuc

SEQ ID NO: 8149 - RNA, 19 nt, Artificial Sequence
  Description of Artificial Sequence: Synthetic oligonucleotide
ggcacacaggauucaucuu

SEQ ID NO: 8150 - RNA, 19 nt, Artificial Sequence
  Description of Artificial Sequence: Synthetic oligonucleotide
uggcacacaggauucaucu

SEQ ID NO: 8151 - RNA, 19 nt, Artificial Sequence
  Description of Artificial Sequence: Synthetic oligonucleotide
guggcacacaggauucauc

SEQ ID NO: 8152 - RNA, 19 nt, Artificial Sequence
  Description of Artificial Sequence: Synthetic oligonucleotide
aguggcacacaggauucau

SEQ ID NO: 8153 - RNA, 19 nt, Artificial Sequence
  Description of Artificial Sequence: Synthetic oligonucleotide
caguggcacacaggauuca

SEQ ID NO: 8154 - RNA, 19 nt, Artificial Sequence
  Description of Artificial Sequence: Synthetic oligonucleotide
gcaguggcacacaggauuc

SEQ ID NO: 8155 - RNA, 19 nt, Artificial Sequence
  Description of Artificial Sequence: Synthetic oligonucleotide
agcaguggcacacaggauu

SEQ ID NO: 8156 - RNA, 19 nt, Artificial Sequence
  Description of Artificial Sequence: Synthetic oligonucleotide
cagcaguggcacacaggau

SEQ ID NO: 8157 - RNA, 19 nt, Artificial Sequence
  Description of Artificial Sequence: Synthetic oligonucleotide
gcagcaguggcacacagga

SEQ ID NO: 8158 - RNA, 19 nt, Artificial Sequence
  Description of Artificial Sequence: Synthetic oligonucleotide
cgcagcaguggcacacagg

SEQ ID NO: 8159 - RNA, 19 nt, Artificial Sequence
  Description of Artificial Sequence: Synthetic oligonucleotide
ccgcagcaguggcacacag

SEQ ID NO: 8160 - RNA, 19 nt, Artificial Sequence
  Description of Artificial Sequence: Synthetic oligonucleotide
uccgcagcaguggcacaca

SEQ ID NO: 8161 - RNA, 19 nt, Artificial Sequence
  Description of Artificial Sequence: Synthetic oligonucleotide
uuccgcagcaguggcacac

SEQ ID NO: 8162 - RNA, 19 nt, Artificial Sequence
  Description of Artificial Sequence: Synthetic oligonucleotide
uuuccgcagcaguggcaca

SEQ ID NO: 8163 - RNA, 19 nt, Artificial Sequence
  Description of Artificial Sequence: Synthetic oligonucleotide
cuuuccgcagcaguggcac

SEQ ID NO: 8164 - RNA, 19 nt, Artificial Sequence
  Description of Artificial Sequence: Synthetic oligonucleotide
ucuuuccgcagcaguggca

SEQ ID NO: 8165 - RNA, 19 nt, Artificial Sequence
  Description of Artificial Sequence: Synthetic oligonucleotide
cucuuuccgcagcaguggc

SEQ ID NO: 8166 - RNA, 19 nt, Artificial Sequence
  Description of Artificial Sequence: Synthetic oligonucleotide
acucuuuccgcagcagugg

SEQ ID NO: 8167 - RNA, 19 nt, Artificial Sequence
  Description of Artificial Sequence: Synthetic oligonucleotide
gacucuuuccgcagcagug

SEQ ID NO: 8168 - RNA, 19 nt, Artificial Sequence
  Description of Artificial Sequence: Synthetic oligonucleotide
ggacucuuuccgcagcagu

SEQ ID NO: 8169 - RNA, 19 nt, Artificial Sequence
  Description of Artificial Sequence: Synthetic oligonucleotide
uggacucuuuccgcagcag

SEQ ID NO: 8170 - RNA, 19 nt, Artificial Sequence
  Description of Artificial Sequence: Synthetic oligonucleotide
auggacucuuuccgcagca

SEQ ID NO: 8171 - RNA, 19 nt, Artificial Sequence
  Description of Artificial Sequence: Synthetic oligonucleotide
gauggacucuuuccgcagc

SEQ ID NO: 8172 - RNA, 19 nt, Artificial Sequence
  Description of Artificial Sequence: Synthetic oligonucleotide
ggauggacucuuuccgcag

SEQ ID NO: 8173 - RNA, 19 nt, Artificial Sequence
  Description of Artificial Sequence: Synthetic oligonucleotide
uggauggacucuuuccgca

SEQ ID NO: 8174 - RNA, 19 nt, Artificial Sequence
  Description of Artificial Sequence: Synthetic oligonucleotide
cuggauggacucuuuccgc

SEQ ID NO: 8175 - RNA, 19 nt, Artificial Sequence
  Description of Artificial Sequence: Synthetic oligonucleotide
gcuggauggacucuuuccg

SEQ ID NO: 8176 - RNA, 19 nt, Artificial Sequence
  Description of Artificial Sequence: Synthetic oligonucleotide
agcuggauggacucuuucc

SEQ ID NO: 8177 - RNA, 19 nt, Artificial Sequence
  Description of Artificial Sequence: Synthetic oligonucleotide
uagcuggauggacucuuuc

SEQ ID NO: 8178 - RNA, 19 nt, Artificial Sequence
  Description of Artificial Sequence: Synthetic oligonucleotide
uuagcuggauggacucuuu

SEQ ID NO: 8179 - RNA, 19 nt, Artificial Sequence
  Description of Artificial Sequence: Synthetic oligonucleotide
cuuagcuggauggacucuu

SEQ ID NO: 8180 - RNA, 19 nt, Artificial Sequence
  Description of Artificial Sequence: Synthetic oligonucleotide
ccuuagcuggauggacucu

SEQ ID NO: 8181 - RNA, 19 nt, Artificial Sequence
  Description of Artificial Sequence: Synthetic oligonucleotide
cccuuagcuggauggacuc

SEQ ID NO: 8182 - RNA, 19 nt, Artificial Sequence
  Description of Artificial Sequence: Synthetic oligonucleotide
ucccuuagcuggauggacu

SEQ ID NO: 8183 - RNA, 19 nt, Artificial Sequence
  Description of Artificial Sequence: Synthetic oligonucleotide
gucccuuagcuggauggac

SEQ ID NO: 8184 - RNA, 19 nt, Artificial Sequence
  Description of Artificial Sequence: Synthetic oligonucleotide
ggucccuuagcuggaugga

SEQ ID NO: 8185 - RNA, 19 nt, Artificial Sequence
  Description of Artificial Sequence: Synthetic oligonucleotide
aggucccuuagcuggaugg

SEQ ID NO: 8186 - RNA, 19 nt, Artificial Sequence
  Description of Artificial Sequence: Synthetic oligonucleotide
caggucccuuagcuggaug

SEQ ID NO: 8187 - RNA, 19 nt, Artificial Sequence
  Description of Artificial Sequence: Synthetic oligonucleotide
ccaggucccuuagcuggau

SEQ ID NO: 8188 - RNA, 19 nt, Artificial Sequence
  Description of Artificial Sequence: Synthetic oligonucleotide
uccaggucccuuagcugga

SEQ ID NO: 8189 - RNA, 19 nt, Artificial Sequence
  Description of Artificial Sequence: Synthetic oligonucleotide
guccaggucccuuagcugg

SEQ ID NO: 8190 - RNA, 19 nt, Artificial Sequence
  Description of Artificial Sequence: Synthetic oligonucleotide
aguccaggucccuuagcug

SEQ ID NO: 8191 - RNA, 19 nt, Artificial Sequence
  Description of Artificial Sequence: Synthetic oligonucleotide
gaguccaggucccuuagcu

SEQ ID NO: 8192 - RNA, 19 nt, Artificial Sequence
  Description of Artificial Sequence: Synthetic oligonucleotide
agaguccaggucccuuagc

SEQ ID NO: 8193 - RNA, 19 nt, Artificial Sequence
  Description of Artificial Sequence: Synthetic oligonucleotide
cagaguccaggucccuuag

SEQ ID NO: 8194 - RNA, 19 nt, Artificial Sequence
  Description of Artificial Sequence: Synthetic oligonucleotide
gcagaguccaggucccuua

SEQ ID NO: 8195 - RNA, 19 nt, Artificial Sequence
  Description of Artificial Sequence: Synthetic oligonucleotide
cgcagaguccaggucccuu

SEQ ID NO: 8196 - RNA, 19 nt, Artificial Sequence
  Description of Artificial Sequence: Synthetic oligonucleotide
gcgcagaguccaggucccu

SEQ ID NO: 8197 - RNA, 19 nt, Artificial Sequence
  Description of Artificial Sequence: Synthetic oligonucleotide
agcgcagaguccagguccc

SEQ ID NO: 8198 - RNA, 19 nt, Artificial Sequence
  Description of Artificial Sequence: Synthetic oligonucleotide
gagcgcagaguccaggucc

SEQ ID NO: 8199 - RNA, 19 nt, Artificial Sequence
  Description of Artificial Sequence: Synthetic oligonucleotide
agagcgcagaguccagguc

SEQ ID NO: 8200 - RNA, 19 nt, Artificial Sequence
  Description of Artificial Sequence: Synthetic oligonucleotide
aagagcgcagaguccaggu

SEQ ID NO: 8201 - RNA, 19 nt, Artificial Sequence
  Description of Artificial Sequence: Synthetic oligonucleotide
caagagcgcagaguccagg

SEQ ID NO: 8202 - RNA, 19 nt, Artificial Sequence
  Description of Artificial Sequence: Synthetic oligonucleotide
ccaagagcgcagaguccag

SEQ ID NO: 8203 - RNA, 19 nt, Artificial Sequence
  Description of Artificial Sequence: Synthetic oligonucleotide
gccaagagcgcagagucca

SEQ ID NO: 8204 - RNA, 19 nt, Artificial Sequence
  Description of Artificial Sequence: Synthetic oligonucleotide
agccaagagcgcagagucc

SEQ ID NO: 8205 - RNA, 19 nt, Artificial Sequence
  Description of Artificial Sequence: Synthetic oligonucleotide
cagccaagagcgcagaguc

SEQ ID NO: 8206 - RNA, 19 nt, Artificial Sequence
  Description of Artificial Sequence: Synthetic oligonucleotide
ucagccaagagcgcagagu

SEQ ID NO: 8207 - RNA, 19 nt, Artificial Sequence
  Description of Artificial Sequence: Synthetic oligonucleotide
cucagccaagagcgcagag

SEQ ID NO: 8208 - RNA, 19 nt, Artificial Sequence
  Description of Artificial Sequence: Synthetic oligonucleotide
ccucagccaagagcgcaga

SEQ ID NO: 8209 - RNA, 19 nt, Artificial Sequence
  Description of Artificial Sequence: Synthetic oligonucleotide
accucagccaagagcgcag

SEQ ID NO: 8210 - RNA, 19 nt, Artificial Sequence
  Description of Artificial Sequence: Synthetic oligonucleotide
gaccucagccaagagcgca

SEQ ID NO: 8211 - RNA, 19 nt, Artificial Sequence
  Description of Artificial Sequence: Synthetic oligonucleotide
ugaccucagccaagagcgc

SEQ ID NO: 8212 - RNA, 19 nt, Artificial Sequence
  Description of Artificial Sequence: Synthetic oligonucleotide
uugaccucagccaagagcg

SEQ ID NO: 8213 - RNA, 19 nt, Artificial Sequence
  Description of Artificial Sequence: Synthetic oligonucleotide
cuugaccucagccaagagc

SEQ ID NO: 8214 - RNA, 19 nt, Artificial Sequence
  Description of Artificial Sequence: Synthetic oligonucleotide
ccuugaccucagccaagag

SEQ ID NO: 8215 - RNA, 19 nt, Artificial Sequence
  Description of Artificial Sequence: Synthetic oligonucleotide
uccuugaccucagccaaga

SEQ ID NO: 8216 - RNA, 19 nt, Artificial Sequence
  Description of Artificial Sequence: Synthetic oligonucleotide
auccuugaccucagccaag

SEQ ID NO: 8217 - RNA, 19 nt, Artificial Sequence
  Description of Artificial Sequence: Synthetic oligonucleotide
cauccuugaccucagccaa

SEQ ID NO: 8218 - RNA, 19 nt, Artificial Sequence
  Description of Artificial Sequence: Synthetic oligonucleotide
acauccuugaccucagcca

SEQ ID NO: 8219 - RNA, 19 nt, Artificial Sequence
  Description of Artificial Sequence: Synthetic oligonucleotide
cacauccuugaccucagcc

SEQ ID NO: 8220 - RNA, 19 nt, Artificial Sequence
  Description of Artificial Sequence: Synthetic oligonucleotide
gcacauccuugaccucagc

SEQ ID NO: 8221 - RNA, 19 nt, Artificial Sequence
  Description of Artificial Sequence: Synthetic oligonucleotide
agcacauccuugaccucag

SEQ ID NO: 8222 - RNA, 19 nt, Artificial Sequence
  Description of Artificial Sequence: Synthetic oligonucleotide
cagcacauccuugaccuca

SEQ ID NO: 8223 - RNA, 19 nt, Artificial Sequence
  Description of Artificial Sequence: Synthetic oligonucleotide
ucagcacauccuugaccuc

SEQ ID NO: 8224 - RNA, 19 nt, Artificial Sequence
  Description of Artificial Sequence: Synthetic oligonucleotide
aucagcacauccuugaccu

SEQ ID NO: 8225 - RNA, 19 nt, Artificial Sequence
  Description of Artificial Sequence: Synthetic oligonucleotide
aaucagcacauccuugacc

SEQ ID NO: 8226 - RNA, 19 nt, Artificial Sequence
  Description of Artificial Sequence: Synthetic oligonucleotide
gaaucagcacauccuugac

SEQ ID NO: 8227 - RNA, 19 nt, Artificial Sequence
  Description of Artificial Sequence: Synthetic oligonucleotide
ggaaucagcacauccuuga

SEQ ID NO: 8228 - RNA, 19 nt, Artificial Sequence
  Description of Artificial Sequence: Synthetic oligonucleotide
gggaaucagcacauccuug

SEQ ID NO: 8229 - RNA, 19 nt, Artificial Sequence
  Description of Artificial Sequence: Synthetic oligonucleotide
ggggaaucagcacauccuu

SEQ ID NO: 8230 - RNA, 19 nt, Artificial Sequence
  Description of Artificial Sequence: Synthetic oligonucleotide
uggggaaucagcacauccu

SEQ ID NO: 8231 - RNA, 19 nt, Artificial Sequence
  Description of Artificial Sequence: Synthetic oligonucleotide
auggggaaucagcacaucc

SEQ ID NO: 8232 - RNA, 19 nt, Artificial Sequence
  Description of Artificial Sequence: Synthetic oligonucleotide
cauggggaaucagcacauc

SEQ ID NO: 8233 - RNA, 19 nt, Artificial Sequence
  Description of Artificial Sequence: Synthetic oligonucleotide
ucauggggaaucagcacau

SEQ ID NO: 8234 - RNA, 19 nt, Artificial Sequence
  Description of Artificial Sequence: Synthetic oligonucleotide
cucauggggaaucagcaca

SEQ ID NO: 8235 - RNA, 19 nt, Artificial Sequence
  Description of Artificial Sequence: Synthetic oligonucleotide
gcucauggggaaucagcac

SEQ ID NO: 8236 - RNA, 19 nt, Artificial Sequence
  Description of Artificial Sequence: Synthetic oligonucleotide
cgcucauggggaaucagca

SEQ ID NO: 8237 - RNA, 19 nt, Artificial Sequence
  Description of Artificial Sequence: Synthetic oligonucleotide
ccgcucauggggaaucagc

SEQ ID NO: 8238 - RNA, 19 nt, Artificial Sequence
  Description of Artificial Sequence: Synthetic oligonucleotide
cccgcucauggggaaucag

SEQ ID NO: 8239 - RNA, 19 nt, Artificial Sequence
  Description of Artificial Sequence: Synthetic oligonucleotide
acccgcucauggggaauca

SEQ ID NO: 8240 - RNA, 19 nt, Artificial Sequence
  Description of Artificial Sequence: Synthetic oligonucleotide
cacccgcucauggggaauc

SEQ ID NO: 8241 - RNA, 19 nt, Artificial Sequence
  Description of Artificial Sequence: Synthetic oligonucleotide
ccacccgcucauggggaau

SEQ ID NO: 8242 - RNA, 19 nt, Artificial Sequence
  Description of Artificial Sequence: Synthetic oligonucleotide
accacccgcucauggggaa

SEQ ID NO: 8243 - RNA, 19 nt, Artificial Sequence
  Description of Artificial Sequence: Synthetic oligonucleotide
gaccacccgcucaugggga

SEQ ID NO: 8244 - RNA, 19 nt, Artificial Sequence
  Description of Artificial Sequence: Synthetic oligonucleotide
ugaccacccgcucaugggg

SEQ ID NO: 8245 - RNA, 19 nt, Artificial Sequence
  Description of Artificial Sequence: Synthetic oligonucleotide
gugaccacccgcucauggg

SEQ ID NO: 8246 - RNA, 19 nt, Artificial Sequence
  Description of Artificial Sequence: Synthetic oligonucleotide
ggugaccacccgcucaugg

SEQ ID NO: 8247 - RNA, 19 nt, Artificial Sequence
  Description of Artificial Sequence: Synthetic oligonucleotide
gggugaccacccgcucaug

SEQ ID NO: 8248 - RNA, 19 nt, Artificial Sequence
  Description of Artificial Sequence: Synthetic oligonucleotide
ugggugaccacccgcucau

SEQ ID NO: 8249 - RNA, 19 nt, Artificial Sequence
  Description of Artificial Sequence: Synthetic oligonucleotide
gugggugaccacccgcuca

SEQ ID NO: 8250 - RNA, 19 nt, Artificial Sequence
  Description of Artificial Sequence: Synthetic oligonucleotide
ugugggugaccacccgcuc

SEQ ID NO: 8251 - RNA, 19 nt, Artificial Sequence
  Description of Artificial Sequence: Synthetic oligonucleotide
cugugggugaccacccgcu

SEQ ID NO: 8252 - RNA, 19 nt, Artificial Sequence
  Description of Artificial Sequence: Synthetic oligonucleotide
acugugggugaccacccgc

SEQ ID NO: 8253 - RNA, 19 nt, Artificial Sequence
  Description of Artificial Sequence: Synthetic oligonucleotide
cacugugggugaccacccg

SEQ ID NO: 8254 - RNA, 19 nt, Artificial Sequence
  Description of Artificial Sequence: Synthetic oligonucleotide
ucacugugggugaccaccc

SEQ ID NO: 8255 - RNA, 19 nt, Artificial Sequence
  Description of Artificial Sequence: Synthetic oligonucleotide
gucacugugggugaccacc

SEQ ID NO: 8256 - RNA, 19 nt, Artificial Sequence
  Description of Artificial Sequence: Synthetic oligonucleotide
ggucacugugggugaccac

SEQ ID NO: 8257 - RNA, 19 nt, Artificial Sequence
  Description of Artificial Sequence: Synthetic oligonucleotide
cggucacugugggugacca

SEQ ID NO: 8258 - RNA, 19 nt, Artificial Sequence
  Description of Artificial Sequence: Synthetic oligonucleotide
ucggucacugugggugacc

SEQ ID NO: 8259 - RNA, 19 nt, Artificial Sequence
  Description of Artificial Sequence: Synthetic oligonucleotide
cucggucacugugggugac

SEQ ID NO: 8260 - RNA, 19 nt, Artificial Sequence
  Description of Artificial Sequence: Synthetic oligonucleotide
acucggucacuguggguga

SEQ ID NO: 8261 - RNA, 19 nt, Artificial Sequence
  Description of Artificial Sequence: Synthetic oligonucleotide
gacucggucacugugggug

SEQ ID NO: 8262 - RNA, 19 nt, Artificial Sequence
  Description of Artificial Sequence: Synthetic oligonucleotide
ugacucggucacugugggu

SEQ ID NO: 8263 - RNA, 19 nt, Artificial Sequence
  Description of Artificial Sequence: Synthetic oligonucleotide
augacucggucacuguggg

SEQ ID NO: 8264 - RNA, 19 nt, Artificial Sequence
  Description of Artificial Sequence: Synthetic oligonucleotide
aaugacucggucacugugg

SEQ ID NO: 8265 - RNA, 19 nt, Artificial Sequence
  Description of Artificial Sequence: Synthetic oligonucleotide
caaugacucggucacugug

SEQ ID NO: 8266 - RNA, 19 nt, Artificial Sequence
  Description of Artificial Sequence: Synthetic oligonucleotide
ccaaugacucggucacugu

SEQ ID NO: 8267 - RNA, 19 nt, Artificial Sequence
  Description of Artificial Sequence: Synthetic oligonucleotide
gccaaugacucggucacug

SEQ ID NO: 8268 - RNA, 19 nt, Artificial Sequence
  Description of Artificial Sequence: Synthetic oligonucleotide
ugccaaugacucggucacu

SEQ ID NO: 8269 - RNA, 19 nt, Artificial Sequence
  Description of Artificial Sequence: Synthetic oligonucleotide
uugccaaugacucggucac

SEQ ID NO: 8270 - RNA, 19 nt, Artificial Sequence
  Description of Artificial Sequence: Synthetic oligonucleotide
uuugccaaugacucgguca

SEQ ID NO: 8271 - RNA, 19 nt, Artificial Sequence
  Description of Artificial Sequence: Synthetic oligonucleotide
cuuugccaaugacucgguc

SEQ ID NO: 8272 - RNA, 19 nt, Artificial Sequence
  Description of Artificial Sequence: Synthetic oligonucleotide
ccuuugccaaugacucggu

SEQ ID NO: 8273 - RNA, 19 nt, Artificial Sequence
  Description of Artificial Sequence: Synthetic oligonucleotide
gccuuugccaaugacucgg

SEQ ID NO: 8274 - RNA, 19 nt, Artificial Sequence
  Description of Artificial Sequence: Synthetic oligonucleotide
ggccuuugccaaugacucg

SEQ ID NO: 8275 - RNA, 19 nt, Artificial Sequence
  Description of Artificial Sequence: Synthetic oligonucleotide
uggccuuugccaaugacuc

SEQ ID NO: 8276 - RNA, 19 nt, Artificial Sequence
  Description of Artificial Sequence: Synthetic oligonucleotide
guggccuuugccaaugacu

SEQ ID NO: 8277 - RNA, 19 nt, Artificial Sequence
  Description of Artificial Sequence: Synthetic oligonucleotide
aguggccuuugccaaugac

SEQ ID NO: 8278 - RNA, 19 nt, Artificial Sequence
  Description of Artificial Sequence: Synthetic oligonucleotide
aaguggccuuugccaauga

SEQ ID NO: 8279 - RNA, 19 nt, Artificial Sequence
  Description of Artificial Sequence: Synthetic oligonucleotide
aaaguggccuuugccaaug

SEQ ID NO: 8280 - RNA, 19 nt, Artificial Sequence
  Description of Artificial Sequence: Synthetic oligonucleotide
caaaguggccuuugccaau

SEQ ID NO: 8281 - RNA, 19 nt, Artificial Sequence
  Description of Artificial Sequence: Synthetic oligonucleotide
ccaaaguggccuuugccaa

SEQ ID NO: 8282 - RNA, 19 nt, Artificial Sequence
  Description of Artificial Sequence: Synthetic oligonucleotide
uccaaaguggccuuugcca

SEQ ID NO: 8283 - RNA, 19 nt, Artificial Sequence
  Description of Artificial Sequence: Synthetic oligonucleotide
cuccaaaguggccuuugcc

SEQ ID NO: 8284 - RNA, 19 nt, Artificial Sequence
  Description of Artificial Sequence: Synthetic oligonucleotide
acuccaaaguggccuuugc

SEQ ID NO: 8285 - RNA, 19 nt, Artificial Sequence
  Description of Artificial Sequence: Synthetic oligonucleotide
aacuccaaaguggccuuug

SEQ ID NO: 8286 - RNA, 19 nt, Artificial Sequence
  Description of Artificial Sequence: Synthetic oligonucleotide
caacuccaaaguggccuuu

SEQ ID NO: 8287 - RNA, 19 nt, Artificial Sequence
  Description of Artificial Sequence: Synthetic oligonucleotide
acaacuccaaaguggccuu

SEQ ID NO: 8288 - RNA, 19 nt, Artificial Sequence
  Description of Artificial Sequence: Synthetic oligonucleotide
gacaacuccaaaguggccu

SEQ ID NO: 8289 - RNA, 19 nt, Artificial Sequence
  Description of Artificial Sequence: Synthetic oligonucleotide
agacaacuccaaaguggcc

SEQ ID NO: 8290 - RNA, 19 nt, Artificial Sequence
  Description of Artificial Sequence: Synthetic oligonucleotide
uagacaacuccaaaguggc

SEQ ID NO: 8291 - RNA, 19 nt, Artificial Sequence
  Description of Artificial Sequence: Synthetic oligonucleotide
guagacaacuccaaagugg

SEQ ID NO: 8292 - RNA, 19 nt, Artificial Sequence
  Description of Artificial Sequence: Synthetic oligonucleotide
gguagacaacuccaaagug

SEQ ID NO: 8293 - RNA, 19 nt, Artificial Sequence
  Description of Artificial Sequence: Synthetic oligonucleotide
ugguagacaacuccaaagu

SEQ ID NO: 8294 - RNA, 19 nt, Artificial Sequence
  Description of Artificial Sequence: Synthetic oligonucleotide
gugguagacaacuccaaag

SEQ ID NO: 8295 - RNA, 19 nt, Artificial Sequence
  Description of Artificial Sequence: Synthetic oligonucleotide
cgugguagacaacuccaaa

SEQ ID NO: 8296 - RNA, 19 nt, Artificial Sequence
  Description of Artificial Sequence: Synthetic oligonucleotide
ccgugguagacaacuccaa

SEQ ID NO: 8297 - RNA, 19 nt, Artificial Sequence
  Description of Artificial Sequence: Synthetic oligonucleotide
uccgugguagacaacucca

SEQ ID NO: 8298 - RNA, 19 nt, Artificial Sequence
  Description of Artificial Sequence: Synthetic oligonucleotide
cuccgugguagacaacucc

SEQ ID NO: 8299 - RNA, 19 nt, Artificial Sequence
  Description of Artificial Sequence: Synthetic oligonucleotide
ucuccgugguagacaacuc

SEQ ID NO: 8300 - RNA, 19 nt, Artificial Sequence
  Description of Artificial Sequence: Synthetic oligonucleotide
uucuccgugguagacaacu

SEQ ID NO: 8301 - RNA, 19 nt, Artificial Sequence
  Description of Artificial Sequence: Synthetic oligonucleotide
auucuccgugguagacaac

SEQ ID NO: 8302 - RNA, 19 nt, Artificial Sequence
  Description of Artificial Sequence: Synthetic oligonucleotide
uauucuccgugguagacaa

SEQ ID NO: 8303 - RNA, 19 nt, Artificial Sequence
  Description of Artificial Sequence: Synthetic oligonucleotide
guauucuccgugguagaca

SEQ ID NO: 8304 - RNA, 19 nt, Artificial Sequence
  Description of Artificial Sequence: Synthetic oligonucleotide
uguauucuccgugguagac

SEQ ID NO: 8305 - RNA, 19 nt, Artificial Sequence
  Description of Artificial Sequence: Synthetic oligonucleotide
auguauucuccgugguaga

SEQ ID NO: 8306 - RNA, 19 nt, Artificial Sequence
  Description of Artificial Sequence: Synthetic oligonucleotide
uauguauucuccgugguag

SEQ ID NO: 8307 - RNA, 19 nt, Artificial Sequence
  Description of Artificial Sequence: Synthetic oligonucleotide
cuauguauucuccguggua

SEQ ID NO: 8308 - RNA, 19 nt, Artificial Sequence
  Description of Artificial Sequence: Synthetic oligonucleotide
ucuauguauucuccguggu

SEQ ID NO: 8309 - RNA, 19 nt, Artificial Sequence
  Description of Artificial Sequence: Synthetic oligonucleotide
gucuauguauucuccgugg

SEQ ID NO: 8310 - RNA, 19 nt, Artificial Sequence
  Description of Artificial Sequence: Synthetic oligonucleotide
ggucuauguauucuccgug

SEQ ID NO: 8311 - RNA, 19 nt, Artificial Sequence
  Description of Artificial Sequence: Synthetic oligonucleotide
uggucuauguauucuccgu

SEQ ID NO: 8312 - RNA, 19 nt, Artificial Sequence
  Description of Artificial Sequence: Synthetic oligonucleotide
cuggucuauguauucuccg

SEQ ID NO: 8313 - RNA, 19 nt, Artificial Sequence
  Description of Artificial Sequence: Synthetic oligonucleotide
ccuggucuauguauucucc

SEQ ID NO: 8314 - RNA, 19 nt, Artificial Sequence
  Description of Artificial Sequence: Synthetic oligonucleotide
gccuggucuauguauucuc

SEQ ID NO: 8315 - RNA, 19 nt, Artificial Sequence
  Description of Artificial Sequence: Synthetic oligonucleotide
ggccuggucuauguauucu

SEQ ID NO: 8316 - RNA, 19 nt, Artificial Sequence
  Description of Artificial Sequence: Synthetic oligonucleotide
gggccuggucuauguauuc

SEQ ID NO: 8317 - RNA, 19 nt, Artificial Sequence
  Description of Artificial Sequence: Synthetic oligonucleotide
ugggccuggucuauguauu

SEQ ID NO: 8318 - RNA, 19 nt, Artificial Sequence
  Description of Artificial Sequence: Synthetic oligonucleotide
cugggccuggucuauguau

SEQ ID NO: 8319 - RNA, 19 nt, Artificial Sequence
  Description of Artificial Sequence: Synthetic oligonucleotide
ucugggccuggucuaugua

SEQ ID NO: 8320 - RNA, 19 nt, Artificial Sequence
  Description of Artificial Sequence: Synthetic oligonucleotide
uucugggccuggucuaugu

SEQ ID NO: 8321 - RNA, 19 nt, Artificial Sequence
  Description of Artificial Sequence: Synthetic oligonucleotide
auucugggccuggucuaug

SEQ ID NO: 8322 - RNA, 19 nt, Artificial Sequence
  Description of Artificial Sequence: Synthetic oligonucleotide
gauucugggccuggucuau

SEQ ID NO: 8323 - RNA, 19 nt, Artificial Sequence
  Description of Artificial Sequence: Synthetic oligonucleotide
cgauucugggccuggucua

SEQ ID NO: 8324 - RNA, 19 nt, Artificial Sequence
  Description of Artificial Sequence: Synthetic oligonucleotide
ucgauucugggccuggucu

SEQ ID NO: 8325 - RNA, 19 nt, Artificial Sequence
  Description of Artificial Sequence: Synthetic oligonucleotide
uucgauucugggccugguc

SEQ ID NO: 8326 - RNA, 19 nt, Artificial Sequence
  Description of Artificial Sequence: Synthetic oligonucleotide
auucgauucugggccuggu

SEQ ID NO: 8327 - RNA, 19 nt, Artificial Sequence
  Description of Artificial Sequence: Synthetic oligonucleotide
gauucgauucugggccugg

SEQ ID NO: 8328 - RNA, 19 nt, Artificial Sequence
  Description of Artificial Sequence: Synthetic oligonucleotide
ggauucgauucugggccug

SEQ ID NO: 8329 - RNA, 19 nt, Artificial Sequence
  Description of Artificial Sequence: Synthetic oligonucleotide
uggauucgauucugggccu

SEQ ID NO: 8330 - RNA, 19 nt, Artificial Sequence
  Description of Artificial Sequence: Synthetic oligonucleotide
uuggauucgauucugggcc

SEQ ID NO: 8331 - RNA, 19 nt, Artificial Sequence
  Description of Artificial Sequence: Synthetic oligonucleotide
auuggauucgauucugggc

SEQ ID NO: 8332 - RNA, 19 nt, Artificial Sequence
  Description of Artificial Sequence: Synthetic oligonucleotide
cauuggauucgauucuggg

SEQ ID NO: 8333 - RNA, 19 nt, Artificial Sequence
  Description of Artificial Sequence: Synthetic oligonucleotide
acauuggauucgauucugg

SEQ ID NO: 8334 - RNA, 19 nt, Artificial Sequence
  Description of Artificial Sequence: Synthetic oligonucleotide
cacauuggauucgauucug

SEQ ID NO: 8335 - RNA, 19 nt, Artificial Sequence
  Description of Artificial Sequence: Synthetic oligonucleotide
gcacauuggauucgauucu

SEQ ID NO: 8336 - RNA, 19 nt, Artificial Sequence
  Description of Artificial Sequence: Synthetic oligonucleotide
ggcacauuggauucgauuc

SEQ ID NO: 8337 - RNA, 19 nt, Artificial Sequence
  Description of Artificial Sequence: Synthetic oligonucleotide
uggcacauuggauucgauu

SEQ ID NO: 8338 - RNA, 19 nt, Artificial Sequence
  Description of Artificial Sequence: Synthetic oligonucleotide
auggcacauuggauucgau

SEQ ID NO: 8339 - RNA, 19 nt, Artificial Sequence
  Description of Artificial Sequence: Synthetic oligonucleotide
gauggcacauuggauucga

SEQ ID NO: 8340 - RNA, 19 nt, Artificial Sequence
  Description of Artificial Sequence: Synthetic oligonucleotide
ugauggcacauuggauucg

SEQ ID NO: 8341 - RNA, 19 nt, Artificial Sequence
  Description of Artificial Sequence: Synthetic oligonucleotide
uugauggcacauuggauuc

SEQ ID NO: 8342 - RNA, 19 nt, Artificial Sequence
  Description of Artificial Sequence: Synthetic oligonucleotide
cuugauggcacauuggauu

SEQ ID NO: 8343 - RNA, 19 nt, Artificial Sequence
  Description of Artificial Sequence: Synthetic oligonucleotide
acuugauggcacauuggau

SEQ ID NO: 8344 - RNA, 19 nt, Artificial Sequence
  Description of Artificial Sequence: Synthetic oligonucleotide
gacuugauggcacauugga

SEQ ID NO: 8345 - RNA, 19 nt, Artificial Sequence
  Description of Artificial Sequence: Synthetic oligonucleotide
ugacuugauggcacauugg

SEQ ID NO: 8346 - RNA, 19 nt, Artificial Sequence
  Description of Artificial Sequence: Synthetic oligonucleotide
gugacuugauggcacauug

SEQ ID NO: 8347 - RNA, 19 nt, Artificial Sequence
  Description of Artificial Sequence: Synthetic oligonucleotide
agugacuugauggcacauu

SEQ ID NO: 8348 - RNA, 19 nt, Artificial Sequence
  Description of Artificial Sequence: Synthetic oligonucleotide
uagugacuugauggcacau

SEQ ID NO: 8349 - RNA, 19 nt, Artificial Sequence
  Description of Artificial Sequence: Synthetic oligonucleotide
uuagugacuugauggcaca

SEQ ID NO: 8350 - RNA, 19 nt, Artificial Sequence
  Description of Artificial Sequence: Synthetic oligonucleotide
cuuagugacuugauggcac

SEQ ID NO: 8351 - RNA, 19 nt, Artificial Sequence
  Description of Artificial Sequence: Synthetic oligonucleotide
acuuagugacuugauggca

SEQ ID NO: 8352 - RNA, 19 nt, Artificial Sequence
  Description of Artificial Sequence: Synthetic oligonucleotide
gacuuagugacuugauggc

SEQ ID NO: 8353 - RNA, 19 nt, Artificial Sequence
  Description of Artificial Sequence: Synthetic oligonucleotide
cgacuuagugacuugaugg

SEQ ID NO: 8354 - RNA, 19 nt, Artificial Sequence
  Description of Artificial Sequence: Synthetic oligonucleotide
gcgacuuagugacuugaug

SEQ ID NO: 8355 - RNA, 19 nt, Artificial Sequence
  Description of Artificial Sequence: Synthetic oligonucleotide
ugcgacuuagugacuugau

SEQ ID NO: 8356 - RNA, 19 nt, Artificial Sequence
  Description of Artificial Sequence: Synthetic oligonucleotide
augcgacuuagugacuuga

SEQ ID NO: 8357 - RNA, 19 nt, Artificial Sequence
  Description of Artificial Sequence: Synthetic oligonucleotide
gaugcgacuuagugacuug

SEQ ID NO: 8358 - RNA, 19 nt, Artificial Sequence
  Description of Artificial Sequence: Synthetic oligonucleotide
ugaugcgacuuagugacuu

SEQ ID NO: 8359 - RNA, 19 nt, Artificial Sequence
  Description of Artificial Sequence: Synthetic oligonucleotide
gugaugcgacuuagugacu

SEQ ID NO: 8360 - RNA, 19 nt, Artificial Sequence
  Description of Artificial Sequence: Synthetic oligonucleotide
ugugaugcgacuuagugac

SEQ ID NO: 8361 - RNA, 19 nt, Artificial Sequence
  Description of Artificial Sequence: Synthetic oligonucleotide
cugugaugcgacuuaguga

SEQ ID NO: 8362 - RNA, 19 nt, Artificial Sequence
  Description of Artificial Sequence: Synthetic oligonucleotide
ucugugaugcgacuuagug

SEQ ID NO: 8363 - RNA, 19 nt, Artificial Sequence
  Description of Artificial Sequence: Synthetic oligonucleotide
cucugugaugcgacuuagu

SEQ ID NO: 8364 - RNA, 19 nt, Artificial Sequence
  Description of Artificial Sequence: Synthetic oligonucleotide
ucucugugaugcgacuuag

SEQ ID NO: 8365 - RNA, 19 nt, Artificial Sequence
  Description of Artificial Sequence: Synthetic oligonucleotide
aucucugugaugcgacuua

SEQ ID NO: 8366 - RNA, 19 nt, Artificial Sequence
  Description of Artificial Sequence: Synthetic oligonucleotide
caucucugugaugcgacuu

SEQ ID NO: 8367 - RNA, 19 nt, Artificial Sequence
  Description of Artificial Sequence: Synthetic oligonucleotide
gcaucucugugaugcgacu

SEQ ID NO: 8368 - RNA, 19 nt, Artificial Sequence
  Description of Artificial Sequence: Synthetic oligonucleotide
ugcaucucugugaugcgac

SEQ ID NO: 8369 - RNA, 19 nt, Artificial Sequence
  Description of Artificial Sequence: Synthetic oligonucleotide
cugcaucucugugaugcga

SEQ ID NO: 8370 - RNA, 19 nt, Artificial Sequence
  Description of Artificial Sequence: Synthetic oligonucleotide
gcugcaucucugugaugcg

SEQ ID NO: 8371 - RNA, 19 nt, Artificial Sequence
  Description of Artificial Sequence: Synthetic oligonucleotide
ugcugcaucucugugaugc

SEQ ID NO: 8372 - RNA, 19 nt, Artificial Sequence
  Description of Artificial Sequence: Synthetic oligonucleotide
cugcugcaucucugugaug

SEQ ID NO: 8373 - RNA, 19 nt, Artificial Sequence
  Description of Artificial Sequence: Synthetic oligonucleotide
ccugcugcaucucugugau

SEQ ID NO: 8374 - RNA, 19 nt, Artificial Sequence
  Description of Artificial Sequence: Synthetic oligonucleotide
accugcugcaucucuguga

SEQ ID NO: 8375 - RNA, 19 nt, Artificial Sequence
  Description of Artificial Sequence: Synthetic oligonucleotide
caccugcugcaucucugug

SEQ ID NO: 8376 - RNA, 19 nt, Artificial Sequence
  Description of Artificial Sequence: Synthetic oligonucleotide
ccaccugcugcaucucugu

SEQ ID NO: 8377 - RNA, 19 nt, Artificial Sequence
  Description of Artificial Sequence: Synthetic oligonucleotide
uccaccugcugcaucucug

SEQ ID NO: 8378 - RNA, 19 nt, Artificial Sequence
  Description of Artificial Sequence: Synthetic oligonucleotide
cuccaccugcugcaucucu

SEQ ID NO: 8379 - RNA, 19 nt, Artificial Sequence
  Description of Artificial Sequence: Synthetic oligonucleotide
ccuccaccugcugcaucuc

SEQ ID NO: 8380 - RNA, 19 nt, Artificial Sequence
  Description of Artificial Sequence: Synthetic oligonucleotide
gccuccaccugcugcaucu

SEQ ID NO: 8381 - RNA, 19 nt, Artificial Sequence
  Description of Artificial Sequence: Synthetic oligonucleotide
ggccuccaccugcugcauc

SEQ ID NO: 8382 - RNA, 19 nt, Artificial Sequence
  Description of Artificial Sequence: Synthetic oligonucleotide
aggccuccaccugcugcau

SEQ ID NO: 8383 - RNA, 19 nt, Artificial Sequence
  Description of Artificial Sequence: Synthetic oligonucleotide
aaggccuccaccugcugca

SEQ ID NO: 8384 - RNA, 19 nt, Artificial Sequence
  Description of Artificial Sequence: Synthetic oligonucleotide
gaaggccuccaccugcugc

SEQ ID NO: 8385 - RNA, 19 nt, Artificial Sequence
  Description of Artificial Sequence: Synthetic oligonucleotide
ggaaggccuccaccugcug

SEQ ID NO: 8386 - RNA, 19 nt, Artificial Sequence
  Description of Artificial Sequence: Synthetic oligonucleotide
aggaaggccuccaccugcu

SEQ ID NO: 8387 - RNA, 19 nt, Artificial Sequence
  Description of Artificial Sequence: Synthetic oligonucleotide
caggaaggccuccaccugc

SEQ ID NO: 8388 - RNA, 19 nt, Artificial Sequence
  Description of Artificial Sequence: Synthetic oligonucleotide
gcaggaaggccuccaccug

SEQ ID NO: 8389 - RNA, 19 nt, Artificial Sequence
  Description of Artificial Sequence: Synthetic oligonucleotide
cgcaggaaggccuccaccu

SEQ ID NO: 8390 - RNA, 19 nt, Artificial Sequence
  Description of Artificial Sequence: Synthetic oligonucleotide
ucgcaggaaggccuccacc

SEQ ID NO: 8391 - RNA, 19 nt, Artificial Sequence
  Description of Artificial Sequence: Synthetic oligonucleotide
cucgcaggaaggccuccac

SEQ ID NO: 8392 - RNA, 19 nt, Artificial Sequence
  Description of Artificial Sequence: Synthetic oligonucleotide
ucucgcaggaaggccucca

SEQ ID NO: 8393 - RNA, 19 nt, Artificial Sequence
  Description of Artificial Sequence: Synthetic oligonucleotide
cucucgcaggaaggccucc

SEQ ID NO: 8394 - RNA, 19 nt, Artificial Sequence
  Description of Artificial Sequence: Synthetic oligonucleotide
ccucucgcaggaaggccuc

SEQ ID NO: 8395 - RNA, 19 nt, Artificial Sequence
  Description of Artificial Sequence: Synthetic oligonucleotide
cccucucgcaggaaggccu

SEQ ID NO: 8396 - RNA, 19 nt, Artificial Sequence
  Description of Artificial Sequence: Synthetic oligonucleotide
ccccucucgcaggaaggcc

SEQ ID NO: 8397 - RNA, 19 nt, Artificial Sequence
  Description of Artificial Sequence: Synthetic oligonucleotide
gccccucucgcaggaaggc

SEQ ID NO: 8398 - RNA, 19 nt, Artificial Sequence
  Description of Artificial Sequence: Synthetic oligonucleotide
agccccucucgcaggaagg

SEQ ID NO: 8399 - RNA, 19 nt, Artificial Sequence
  Description of Artificial Sequence: Synthetic oligonucleotide
cagccccucucgcaggaag

SEQ ID NO: 8400 - RNA, 19 nt, Artificial Sequence
  Description of Artificial Sequence: Synthetic oligonucleotide
gcagccccucucgcaggaa

SEQ ID NO: 8401 - RNA, 19 nt, Artificial Sequence
  Description of Artificial Sequence: Synthetic oligonucleotide
agcagccccucucgcagga

SEQ ID NO: 8402 - RNA, 19 nt, Artificial Sequence
  Description of Artificial Sequence: Synthetic oligonucleotide
gagcagccccucucgcagg

SEQ ID NO: 8403 - RNA, 19 nt, Artificial Sequence
  Description of Artificial Sequence: Synthetic oligonucleotide
ugagcagccccucucgcag

SEQ ID NO: 8404 - RNA, 19 nt, Artificial Sequence
  Description of Artificial Sequence: Synthetic oligonucleotide
augagcagccccucucgca

SEQ ID NO: 8405 - RNA, 19 nt, Artificial Sequence
  Description of Artificial Sequence: Synthetic oligonucleotide
caugagcagccccucucgc

SEQ ID NO: 8406 - RNA, 19 nt, Artificial Sequence
  Description of Artificial Sequence: Synthetic oligonucleotide
gcaugagcagccccucucg

SEQ ID NO: 8407 - RNA, 19 nt, Artificial Sequence
  Description of Artificial Sequence: Synthetic oligonucleotide
cgcaugagcagccccucuc

SEQ ID NO: 8408 - RNA, 19 nt, Artificial Sequence
  Description of Artificial Sequence: Synthetic oligonucleotide
acgcaugagcagccccucu

SEQ ID NO: 8409 - RNA, 19 nt, Artificial Sequence
  Description of Artificial Sequence: Synthetic oligonucleotide
cacgcaugagcagccccuc

SEQ ID NO: 8410 - RNA, 19 nt, Artificial Sequence
  Description of Artificial Sequence: Synthetic oligonucleotide
ccacgcaugagcagccccu

SEQ ID NO: 8411 - RNA, 19 nt, Artificial Sequence
  Description of Artificial Sequence: Synthetic oligonucleotide
gccacgcaugagcagcccc

SEQ ID NO: 8412 - RNA, 19 nt, Artificial Sequence
  Description of Artificial Sequence: Synthetic oligonucleotide
ggccacgcaugagcagccc

SEQ ID NO: 8413 - RNA, 19 nt, Artificial Sequence
  Description of Artificial Sequence: Synthetic oligonucleotide
aggccacgcaugagcagcc

SEQ ID NO: 8414 - RNA, 19 nt, Artificial Sequence
  Description of Artificial Sequence: Synthetic oligonucleotide
caggccacgcaugagcagc

SEQ ID NO: 8415 - RNA, 19 nt, Artificial Sequence
  Description of Artificial Sequence: Synthetic oligonucleotide
ucaggccacgcaugagcag

SEQ ID NO: 8416 - RNA, 19 nt, Artificial Sequence
  Description of Artificial Sequence: Synthetic oligonucleotide
uucaggccacgcaugagca

SEQ ID NO: 8417 - RNA, 19 nt, Artificial Sequence
  Description of Artificial Sequence: Synthetic oligonucleotide
guucaggccacgcaugagc

SEQ ID NO: 8418 - RNA, 19 nt, Artificial Sequence
  Description of Artificial Sequence: Synthetic oligonucleotide
gguucaggccacgcaugag

SEQ ID NO: 8419 - RNA, 19 nt, Artificial Sequence
  Description of Artificial Sequence: Synthetic oligonucleotide
ugguucaggccacgcauga

SEQ ID NO: 8420 - RNA, 19 nt, Artificial Sequence
  Description of Artificial Sequence: Synthetic oligonucleotide
gugguucaggccacgcaug

SEQ ID NO: 8421 - RNA, 19 nt, Artificial Sequence
  Description of Artificial Sequence: Synthetic oligonucleotide
ggugguucaggccacgcau

SEQ ID NO: 8422 - RNA, 19 nt, Artificial Sequence
  Description of Artificial Sequence: Synthetic oligonucleotide
gggugguucaggccacgca

SEQ ID NO: 8423 - RNA, 19 nt, Artificial Sequence
  Description of Artificial Sequence: Synthetic oligonucleotide
cgggugguucaggccacgc

SEQ ID NO: 8424 - RNA, 19 nt, Artificial Sequence
  Description of Artificial Sequence: Synthetic oligonucleotide
ucgggugguucaggccacg

SEQ ID NO: 8425 - RNA, 19 nt, Artificial Sequence
  Description of Artificial Sequence: Synthetic oligonucleotide
uucgggugguucaggccac

SEQ ID NO: 8426 - RNA, 19 nt, Artificial Sequence
  Description of Artificial Sequence: Synthetic oligonucleotide
auucgggugguucaggcca

SEQ ID NO: 8427 - RNA, 19 nt, Artificial Sequence
  Description of Artificial Sequence: Synthetic oligonucleotide
cauucgggugguucaggcc

SEQ ID NO: 8428 - RNA, 19 nt, Artificial Sequence
  Description of Artificial Sequence: Synthetic oligonucleotide
acauucgggugguucaggc

SEQ ID NO: 8429 - RNA, 19 nt, Artificial Sequence
  Description of Artificial Sequence: Synthetic oligonucleotide
cacauucgggugguucagg

SEQ ID NO: 8430 - RNA, 19 nt, Artificial Sequence
  Description of Artificial Sequence: Synthetic oligonucleotide
gcacauucgggugguucag

SEQ ID NO: 8431 - RNA, 19 nt, Artificial Sequence
  Description of Artificial Sequence: Synthetic oligonucleotide
agcacauucgggugguuca

SEQ ID NO: 8432 - RNA, 19 nt, Artificial Sequence
  Description of Artificial Sequence: Synthetic oligonucleotide
cagcacauucgggugguuc

SEQ ID NO: 8433 - RNA, 19 nt, Artificial Sequence
  Description of Artificial Sequence: Synthetic oligonucleotide
ccagcacauucgggugguu

SEQ ID NO: 8434 - RNA, 19 nt, Artificial Sequence
  Description of Artificial Sequence: Synthetic oligonucleotide
gccagcacauucggguggu

SEQ ID NO: 8435 - RNA, 19 nt, Artificial Sequence
  Description of Artificial Sequence: Synthetic oligonucleotide
agccagcacauucgggugg

SEQ ID NO: 8436 - RNA, 19 nt, Artificial Sequence
  Description of Artificial Sequence: Synthetic oligonucleotide
gagccagcacauucgggug

SEQ ID NO: 8437 - RNA, 19 nt, Artificial Sequence
  Description of Artificial Sequence: Synthetic oligonucleotide
agagccagcacauucgggu

SEQ ID NO: 8438 - RNA, 19 nt, Artificial Sequence
  Description of Artificial Sequence: Synthetic oligonucleotide
gagagccagcacauucggg

SEQ ID NO: 8439 - RNA, 19 nt, Artificial Sequence
  Description of Artificial Sequence: Synthetic oligonucleotide
ugagagccagcacauucgg

SEQ ID NO: 8440 - RNA, 19 nt, Artificial Sequence
  Description of Artificial Sequence: Synthetic oligonucleotide
augagagccagcacauucg

SEQ ID NO: 8441 - RNA, 19 nt, Artificial Sequence
  Description of Artificial Sequence: Synthetic oligonucleotide
aaugagagccagcacauuc

SEQ ID NO: 8442 - RNA, 19 nt, Artificial Sequence
  Description of Artificial Sequence: Synthetic oligonucleotide
caaugagagccagcacauu

SEQ ID NO: 8443 - RNA, 19 nt, Artificial Sequence
  Description of Artificial Sequence: Synthetic oligonucleotide
ccaaugagagccagcacau

SEQ ID NO: 8444 - RNA, 19 nt, Artificial Sequence
  Description of Artificial Sequence: Synthetic oligonucleotide
accaaugagagccagcaca

SEQ ID NO: 8445 - RNA, 19 nt, Artificial Sequence
  Description of Artificial Sequence: Synthetic oligonucleotide
uaccaaugagagccagcac

SEQ ID NO: 8446 - RNA, 19 nt, Artificial Sequence
  Description of Artificial Sequence: Synthetic oligonucleotide
auaccaaugagagccagca

SEQ ID NO: 8447 - RNA, 19 nt, Artificial Sequence
  Description of Artificial Sequence: Synthetic oligonucleotide
gauaccaaugagagccagc

SEQ ID NO: 8448 - RNA, 19 nt, Artificial Sequence
  Description of Artificial Sequence: Synthetic oligonucleotide
ugauaccaaugagagccag

SEQ ID NO: 8449 - RNA, 19 nt, Artificial Sequence
  Description of Artificial Sequence: Synthetic oligonucleotide
augauaccaaugagagcca

SEQ ID NO: 8450 - RNA, 19 nt, Artificial Sequence
  Description of Artificial Sequence: Synthetic oligonucleotide
caugauaccaaugagagcc

SEQ ID NO: 8451 - RNA, 19 nt, Artificial Sequence
  Description of Artificial Sequence: Synthetic oligonucleotide
acaugauaccaaugagagc

SEQ ID NO: 8452 - RNA, 19 nt, Artificial Sequence
  Description of Artificial Sequence: Synthetic oligonucleotide
aacaugauaccaaugagag

SEQ ID NO: 8453 - RNA, 19 nt, Artificial Sequence
  Description of Artificial Sequence: Synthetic oligonucleotide
caacaugauaccaaugaga

SEQ ID NO: 8454 - RNA, 19 nt, Artificial Sequence
  Description of Artificial Sequence: Synthetic oligonucleotide
gcaacaugauaccaaugag

SEQ ID NO: 8455 - RNA, 19 nt, Artificial Sequence
  Description of Artificial Sequence: Synthetic oligonucleotide
ggcaacaugauaccaauga

SEQ ID NO: 8456 - RNA, 19 nt, Artificial Sequence
  Description of Artificial Sequence: Synthetic oligonucleotide
uggcaacaugauaccaaug

SEQ ID NO: 8457 - RNA, 19 nt, Artificial Sequence
  Description of Artificial Sequence: Synthetic oligonucleotide
guggcaacaugauaccaau

SEQ ID NO: 8458 - RNA, 19 nt, Artificial Sequence
  Description of Artificial Sequence: Synthetic oligonucleotide
gguggcaacaugauaccaa

SEQ ID NO: 8459 - RNA, 19 nt, Artificial Sequence
  Description of Artificial Sequence: Synthetic oligonucleotide
agguggcaacaugauacca

SEQ ID NO: 8460 - RNA, 19 nt, Artificial Sequence
  Description of Artificial Sequence: Synthetic oligonucleotide
cagguggcaacaugauacc

SEQ ID NO: 8461 - RNA, 19 nt, Artificial Sequence
  Description of Artificial Sequence: Synthetic oligonucleotide
ucagguggcaacaugauac

SEQ ID NO: 8462 - RNA, 19 nt, Artificial Sequence
  Description of Artificial Sequence: Synthetic oligonucleotide
cucagguggcaacaugaua

SEQ ID NO: 8463 - RNA, 19 nt, Artificial Sequence
  Description of Artificial Sequence: Synthetic oligonucleotide
ccucagguggcaacaugau

SEQ ID NO: 8464 - RNA, 19 nt, Artificial Sequence
  Description of Artificial Sequence: Synthetic oligonucleotide
cccucagguggcaacauga

SEQ ID NO: 8465 - RNA, 19 nt, Artificial Sequence
  Description of Artificial Sequence: Synthetic oligonucleotide
gcccucagguggcaacaug

SEQ ID NO: 8466 - RNA, 19 nt, Artificial Sequence
  Description of Artificial Sequence: Synthetic oligonucleotide
ggcccucagguggcaacau

SEQ ID NO: 8467 - RNA, 19 nt, Artificial Sequence
  Description of Artificial Sequence: Synthetic oligonucleotide
aggcccucagguggcaaca

SEQ ID NO: 8468 - RNA, 19 nt, Artificial Sequence
  Description of Artificial Sequence: Synthetic oligonucleotide
caggcccucagguggcaac

SEQ ID NO: 8469 - RNA, 19 nt, Artificial Sequence
  Description of Artificial Sequence: Synthetic oligonucleotide
gcaggcccucagguggcaa

SEQ ID NO: 8470 - RNA, 19 nt, Artificial Sequence
  Description of Artificial Sequence: Synthetic oligonucleotide
ggcaggcccucagguggca

SEQ ID NO: 8471 - RNA, 19 nt, Artificial Sequence
  Description of Artificial Sequence: Synthetic oligonucleotide
gggcaggcccucagguggc

SEQ ID NO: 8472 - RNA, 19 nt, Artificial Sequence
  Description of Artificial Sequence: Synthetic oligonucleotide
ggggcaggcccucaggugg

SEQ ID NO: 8473 - RNA, 19 nt, Artificial Sequence
  Description of Artificial Sequence: Synthetic oligonucleotide
uggggcaggcccucaggug

SEQ ID NO: 8474 - RNA, 19 nt, Artificial Sequence
  Description of Artificial Sequence: Synthetic oligonucleotide
auggggcaggcccucaggu

SEQ ID NO: 8475 - RNA, 19 nt, Artificial Sequence
  Description of Artificial Sequence: Synthetic oligonucleotide
cauggggcaggcccucagg

SEQ ID NO: 8476 - RNA, 19 nt, Artificial Sequence
  Description of Artificial Sequence: Synthetic oligonucleotide
acauggggcaggcccucag

SEQ ID NO: 8477 - RNA, 19 nt, Artificial Sequence
  Description of Artificial Sequence: Synthetic oligonucleotide
cacauggggcaggcccuca

SEQ ID NO: 8478 - RNA, 19 nt, Artificial Sequence
  Description of Artificial Sequence: Synthetic oligonucleotide
gcacauggggcaggcccuc

SEQ ID NO: 8479 - RNA, 19 nt, Artificial Sequence
  Description of Artificial Sequence: Synthetic oligonucleotide
agcacauggggcaggcccu

SEQ ID NO: 8480 - RNA, 19 nt, Artificial Sequence
  Description of Artificial Sequence: Synthetic oligonucleotide
cagcacauggggcaggccc

SEQ ID NO: 8481 - RNA, 19 nt, Artificial Sequence
  Description of Artificial Sequence: Synthetic oligonucleotide
gcagcacauggggcaggcc

SEQ ID NO: 8482 - RNA, 19 nt, Artificial Sequence
  Description of Artificial Sequence: Synthetic oligonucleotide
agcagcacauggggcaggc

SEQ ID NO: 8483 - RNA, 19 nt, Artificial Sequence
  Description of Artificial Sequence: Synthetic oligonucleotide
cagcagcacauggggcagg

SEQ ID NO: 8484 - RNA, 19 nt, Artificial Sequence
  Description of Artificial Sequence: Synthetic oligonucleotide
gcagcagcacauggggcag

SEQ ID NO: 8485 - RNA, 19 nt, Artificial Sequence
  Description of Artificial Sequence: Synthetic oligonucleotide
ggcagcagcacauggggca

SEQ ID NO: 8486 - RNA, 19 nt, Artificial Sequence
  Description of Artificial Sequence: Synthetic oligonucleotide
gggcagcagcacauggggc

SEQ ID NO: 8487 - RNA, 19 nt, Artificial Sequence
  Description of Artificial Sequence: Synthetic oligonucleotide
agggcagcagcacaugggg

SEQ ID NO: 8488 - RNA, 19 nt, Artificial Sequence
  Description of Artificial Sequence: Synthetic oligonucleotide
uagggcagcagcacauggg

SEQ ID NO: 8489 - RNA, 19 nt, Artificial Sequence
  Description of Artificial Sequence: Synthetic oligonucleotide
auagggcagcagcacaugg

SEQ ID NO: 8490 - RNA, 19 nt, Artificial Sequence
  Description of Artificial Sequence: Synthetic oligonucleotide
uauagggcagcagcacaug

SEQ ID NO: 8491 - RNA, 19 nt, Artificial Sequence
  Description of Artificial Sequence: Synthetic oligonucleotide
auauagggcagcagcacau

SEQ ID NO: 8492 - RNA, 19 nt, Artificial Sequence
  Description of Artificial Sequence: Synthetic oligonucleotide
cauauagggcagcagcaca

SEQ ID NO: 8493 - RNA, 19 nt, Artificial Sequence
  Description of Artificial Sequence: Synthetic oligonucleotide
acauauagggcagcagcac

SEQ ID NO: 8494 - RNA, 19 nt, Artificial Sequence
  Description of Artificial Sequence: Synthetic oligonucleotide
cacauauagggcagcagca

SEQ ID NO: 8495 - RNA, 19 nt, Artificial Sequence
  Description of Artificial Sequence: Synthetic oligonucleotide
gcacauauagggcagcagc

SEQ ID NO: 8496 - RNA, 19 nt, Artificial Sequence
  Description of Artificial Sequence: Synthetic oligonucleotide
ggcacauauagggcagcag

SEQ ID NO: 8497 - RNA, 19 nt, Artificial Sequence
  Description of Artificial Sequence: Synthetic oligonucleotide
uggcacauauagggcagca

SEQ ID NO: 8498 - RNA, 19 nt, Artificial Sequence
  Description of Artificial Sequence: Synthetic oligonucleotide
guggcacauauagggcagc

SEQ ID NO: 8499 - RNA, 19 nt, Artificial Sequence
  Description of Artificial Sequence: Synthetic oligonucleotide
cguggcacauauagggcag

SEQ ID NO: 8500 - RNA, 19 nt, Artificial Sequence
  Description of Artificial Sequence: Synthetic oligonucleotide
ccguggcacauauagggca

SEQ ID NO: 8501 - RNA, 19 nt, Artificial Sequence
  Description of Artificial Sequence: Synthetic oligonucleotide
accguggcacauauagggc

SEQ ID NO: 8502 - RNA, 19 nt, Artificial Sequence
  Description of Artificial Sequence: Synthetic oligonucleotide
caccguggcacauauaggg

SEQ ID NO: 8503 - RNA, 19 nt, Artificial Sequence
  Description of Artificial Sequence: Synthetic oligonucleotide
ucaccguggcacauauagg

SEQ ID NO: 8504 - RNA, 19 nt, Artificial Sequence
  Description of Artificial Sequence: Synthetic oligonucleotide
gucaccguggcacauauag

SEQ ID NO: 8505 - RNA, 19 nt, Artificial Sequence
  Description of Artificial Sequence: Synthetic oligonucleotide
ggucaccguggcacauaua

SEQ ID NO: 8506 - RNA, 19 nt, Artificial Sequence
  Description of Artificial Sequence: Synthetic oligonucleotide
aggucaccguggcacauau

SEQ ID NO: 8507 - RNA, 19 nt, Artificial Sequence
  Description of Artificial Sequence: Synthetic oligonucleotide
caggucaccguggcacaua

SEQ ID NO: 8508 - RNA, 19 nt, Artificial Sequence
  Description of Artificial Sequence: Synthetic oligonucleotide
gcaggucaccguggcacau

SEQ ID NO: 8509 - RNA, 19 nt, Artificial Sequence
  Description of Artificial Sequence: Synthetic oligonucleotide
agcaggucaccguggcaca

SEQ ID NO: 8510 - RNA, 19 nt, Artificial Sequence
  Description of Artificial Sequence: Synthetic oligonucleotide
gagcaggucaccguggcac

SEQ ID NO: 8511 - RNA, 19 nt, Artificial Sequence
  Description of Artificial Sequence: Synthetic oligonucleotide
ggagcaggucaccguggca

SEQ ID NO: 8512 - RNA, 19 nt, Artificial Sequence
  Description of Artificial Sequence: Synthetic oligonucleotide
uggagcaggucaccguggc

SEQ ID NO: 8513 - RNA, 19 nt, Artificial Sequence
  Description of Artificial Sequence: Synthetic oligonucleotide
cuggagcaggucaccgugg

SEQ ID NO: 8514 - RNA, 19 nt, Artificial Sequence
  Description of Artificial Sequence: Synthetic oligonucleotide
acuggagcaggucaccgug

SEQ ID NO: 8515 - RNA, 19 nt, Artificial Sequence
  Description of Artificial Sequence: Synthetic oligonucleotide
aacuggagcaggucaccgu

SEQ ID NO: 8516 - RNA, 19 nt, Artificial Sequence
  Description of Artificial Sequence: Synthetic oligonucleotide
gaacuggagcaggucaccg

SEQ ID NO: 8517 - RNA, 19 nt, Artificial Sequence
  Description of Artificial Sequence: Synthetic oligonucleotide
ugaacuggagcaggucacc

SEQ ID NO: 8518 - RNA, 19 nt, Artificial Sequence
  Description of Artificial Sequence: Synthetic oligonucleotide
augaacuggagcaggucac

SEQ ID NO: 8519 - RNA, 19 nt, Artificial Sequence
  Description of Artificial Sequence: Synthetic oligonucleotide
gaugaacuggagcagguca

SEQ ID NO: 8520 - RNA, 19 nt, Artificial Sequence
  Description of Artificial Sequence: Synthetic oligonucleotide
ggaugaacuggagcagguc

SEQ ID NO: 8521 - RNA, 19 nt, Artificial Sequence
  Description of Artificial Sequence: Synthetic oligonucleotide
cggaugaacuggagcaggu

SEQ ID NO: 8522 - RNA, 19 nt, Artificial Sequence
  Description of Artificial Sequence: Synthetic oligonucleotide
gcggaugaacuggagcagg

SEQ ID NO: 8523 - RNA, 19 nt, Artificial Sequence
  Description of Artificial Sequence: Synthetic oligonucleotide
agcggaugaacuggagcag

SEQ ID NO: 8524 - RNA, 19 nt, Artificial Sequence
  Description of Artificial Sequence: Synthetic oligonucleotide
gagcggaugaacuggagca

SEQ ID NO: 8525 - RNA, 19 nt, Artificial Sequence
  Description of Artificial Sequence: Synthetic oligonucleotide
ugagcggaugaacuggagc

SEQ ID NO: 8526 - RNA, 19 nt, Artificial Sequence
  Description of Artificial Sequence: Synthetic oligonucleotide
gugagcggaugaacuggag

SEQ ID NO: 8527 - RNA, 19 nt, Artificial Sequence
  Description of Artificial Sequence: Synthetic oligonucleotide
ggugagcggaugaacugga

SEQ ID NO: 8528 - RNA, 19 nt, Artificial Sequence
  Description of Artificial Sequence: Synthetic oligonucleotide
aggugagcggaugaacugg

SEQ ID NO: 8529 - RNA, 19 nt, Artificial Sequence
  Description of Artificial Sequence: Synthetic oligonucleotide
gaggugagcggaugaacug

SEQ ID NO: 8530 - RNA, 19 nt, Artificial Sequence
  Description of Artificial Sequence: Synthetic oligonucleotide
ugaggugagcggaugaacu

SEQ ID NO: 8531 - RNA, 19 nt, Artificial Sequence
  Description of Artificial Sequence: Synthetic oligonucleotide
cugaggugagcggaugaac

SEQ ID NO: 8532 - RNA, 19 nt, Artificial Sequence
  Description of Artificial Sequence: Synthetic oligonucleotide
gcugaggugagcggaugaa

SEQ ID NO: 8533 - RNA, 19 nt, Artificial Sequence
  Description of Artificial Sequence: Synthetic oligonucleotide
cgcugaggugagcggauga

SEQ ID NO: 8534 - RNA, 19 nt, Artificial Sequence
  Description of Artificial Sequence: Synthetic oligonucleotide
ccgcugaggugagcggaug

SEQ ID NO: 8535 - RNA, 19 nt, Artificial Sequence
  Description of Artificial Sequence: Synthetic oligonucleotide
uccgcugaggugagcggau

SEQ ID NO: 8536 - RNA, 19 nt, Artificial Sequence
  Description of Artificial Sequence: Synthetic oligonucleotide
uuccgcugaggugagcgga

SEQ ID NO: 8537 - RNA, 19 nt, Artificial Sequence
  Description of Artificial Sequence: Synthetic oligonucleotide
guuccgcugaggugagcgg

SEQ ID NO: 8538 - RNA, 19 nt, Artificial Sequence
  Description of Artificial Sequence: Synthetic oligonucleotide
gguuccgcugaggugagcg

SEQ ID NO: 8539 - RNA, 19 nt, Artificial Sequence
  Description of Artificial Sequence: Synthetic oligonucleotide
ggguuccgcugaggugagc

SEQ ID NO: 8540 - RNA, 19 nt, Artificial Sequence
  Description of Artificial Sequence: Synthetic oligonucleotide
gggguuccgcugaggugag

SEQ ID NO: 8541 - RNA, 19 nt, Artificial Sequence
  Description of Artificial Sequence: Synthetic oligonucleotide
ugggguuccgcugagguga

SEQ ID NO: 8542 - RNA, 19 nt, Artificial Sequence
  Description of Artificial Sequence: Synthetic oligonucleotide
gugggguuccgcugaggug

SEQ ID NO: 8543 - RNA, 19 nt, Artificial Sequence
  Description of Artificial Sequence: Synthetic oligonucleotide
ggugggguuccgcugaggu

SEQ ID NO: 8544 - RNA, 19 nt, Artificial Sequence
  Description of Artificial Sequence: Synthetic oligonucleotide
cggugggguuccgcugagg

SEQ ID NO: 8545 - RNA, 19 nt, Artificial Sequence
  Description of Artificial Sequence: Synthetic oligonucleotide
acggugggguuccgcugag

SEQ ID NO: 8546 - RNA, 19 nt, Artificial Sequence
  Description of Artificial Sequence: Synthetic oligonucleotide
cacggugggguuccgcuga

SEQ ID NO: 8547 - RNA, 19 nt, Artificial Sequence
  Description of Artificial Sequence: Synthetic oligonucleotide
ucacggugggguuccgcug

SEQ ID NO: 8548 - RNA, 19 nt, Artificial Sequence
  Description of Artificial Sequence: Synthetic oligonucleotide
uucacggugggguuccgcu

SEQ ID NO: 8549 - RNA, 19 nt, Artificial Sequence
  Description of Artificial Sequence: Synthetic oligonucleotide
cuucacggugggguuccgc

SEQ ID NO: 8550 - RNA, 19 nt, Artificial Sequence
  Description of Artificial Sequence: Synthetic oligonucleotide
ccuucacggugggguuccg

SEQ ID NO: 8551 - RNA, 19 nt, Artificial Sequence
  Description of Artificial Sequence: Synthetic oligonucleotide
uccuucacggugggguucc

SEQ ID NO: 8552 - RNA, 19 nt, Artificial Sequence
  Description of Artificial Sequence: Synthetic oligonucleotide
guccuucacggugggguuc

SEQ ID NO: 8553 - RNA, 19 nt, Artificial Sequence
  Description of Artificial Sequence: Synthetic oligonucleotide
gguccuucacggugggguu

SEQ ID NO: 8554 - RNA, 19 nt, Artificial Sequence
  Description of Artificial Sequence: Synthetic oligonucleotide
agguccuucacgguggggu

SEQ ID NO: 8555 - RNA, 19 nt, Artificial Sequence
  Description of Artificial Sequence: Synthetic oligonucleotide
gagguccuucacggugggg

SEQ ID NO: 8556 - RNA, 19 nt, Artificial Sequence
  Description of Artificial Sequence: Synthetic oligonucleotide
ugagguccuucacgguggg

SEQ ID NO: 8557 - RNA, 19 nt, Artificial Sequence
  Description of Artificial Sequence: Synthetic oligonucleotide
augagguccuucacggugg

SEQ ID NO: 8558 - RNA, 19 nt, Artificial Sequence
  Description of Artificial Sequence: Synthetic oligonucleotide
gaugagguccuucacggug

SEQ ID NO: 8559 - RNA, 19 nt, Artificial Sequence
  Description of Artificial Sequence: Synthetic oligonucleotide
ugaugagguccuucacggu

SEQ ID NO: 8560 - RNA, 19 nt, Artificial Sequence
  Description of Artificial Sequence: Synthetic oligonucleotide
cugaugagguccuucacgg

SEQ ID NO: 8561 - RNA, 19 nt, Artificial Sequence
  Description of Artificial Sequence: Synthetic oligonucleotide
gcugaugagguccuucacg

SEQ ID NO: 8562 - RNA, 19 nt, Artificial Sequence
  Description of Artificial Sequence: Synthetic oligonucleotide
agcugaugagguccuucac

SEQ ID NO: 8563 - RNA, 19 nt, Artificial Sequence
  Description of Artificial Sequence: Synthetic oligonucleotide
aagcugaugagguccuuca

SEQ ID NO: 8564 - RNA, 19 nt, Artificial Sequence
  Description of Artificial Sequence: Synthetic oligonucleotide
aaagcugaugagguccuuc

SEQ ID NO: 8565 - RNA, 19 nt, Artificial Sequence
  Description of Artificial Sequence: Synthetic oligonucleotide
caaagcugaugagguccuu

SEQ ID NO: 8566 - RNA, 19 nt, Artificial Sequence
  Description of Artificial Sequence: Synthetic oligonucleotide
ccaaagcugaugagguccu

SEQ ID NO: 8567 - RNA, 19 nt, Artificial Sequence
  Description of Artificial Sequence: Synthetic oligonucleotide
gccaaagcugaugaggucc

SEQ ID NO: 8568 - RNA, 19 nt, Artificial Sequence
  Description of Artificial Sequence: Synthetic oligonucleotide
ggccaaagcugaugagguc

SEQ ID NO: 8569 - RNA, 19 nt, Artificial Sequence
  Description of Artificial Sequence: Synthetic oligonucleotide
aggccaaagcugaugaggu

SEQ ID NO: 8570 - RNA, 19 nt, Artificial Sequence
  Description of Artificial Sequence: Synthetic oligonucleotide
caggccaaagcugaugagg

SEQ ID NO: 8571 - RNA, 19 nt, Artificial Sequence
  Description of Artificial Sequence: Synthetic oligonucleotide
gcaggccaaagcugaugag

SEQ ID NO: 8572 - RNA, 19 nt, Artificial Sequence
  Description of Artificial Sequence: Synthetic oligonucleotide
ugcaggccaaagcugauga

SEQ ID NO: 8573 - RNA, 19 nt, Artificial Sequence
  Description of Artificial Sequence: Synthetic oligonucleotide
cugcaggccaaagcugaug

SEQ ID NO: 8574 - RNA, 19 nt, Artificial Sequence
  Description of Artificial Sequence: Synthetic oligonucleotide
ccugcaggccaaagcugau

SEQ ID NO: 8575 - RNA, 19 nt, Artificial Sequence
  Description of Artificial Sequence: Synthetic oligonucleotide
accugcaggccaaagcuga

SEQ ID NO: 8576 - RNA, 19 nt, Artificial Sequence
  Description of Artificial Sequence: Synthetic oligonucleotide
uaccugcaggccaaagcug

SEQ ID NO: 8577 - RNA, 19 nt, Artificial Sequence
  Description of Artificial Sequence: Synthetic oligonucleotide
cuaccugcaggccaaagcu

SEQ ID NO: 8578 - RNA, 19 nt, Artificial Sequence
  Description of Artificial Sequence: Synthetic oligonucleotide
gcuaccugcaggccaaagc

SEQ ID NO: 8579 - RNA, 19 nt, Artificial Sequence
  Description of Artificial Sequence: Synthetic oligonucleotide
ggcuaccugcaggccaaag

SEQ ID NO: 8580 - RNA, 19 nt, Artificial Sequence
  Description of Artificial Sequence: Synthetic oligonucleotide
gggcuaccugcaggccaaa

SEQ ID NO: 8581 - RNA, 19 nt, Artificial Sequence
  Description of Artificial Sequence: Synthetic oligonucleotide
cgggcuaccugcaggccaa

SEQ ID NO: 8582 - RNA, 19 nt, Artificial Sequence
  Description of Artificial Sequence: Synthetic oligonucleotide
gcgggcuaccugcaggcca

SEQ ID NO: 8583 - RNA, 19 nt, Artificial Sequence
  Description of Artificial Sequence: Synthetic oligonucleotide
cgcgggcuaccugcaggcc

SEQ ID NO: 8584 - RNA, 19 nt, Artificial Sequence
  Description of Artificial Sequence: Synthetic oligonucleotide
ccgcgggcuaccugcaggc

SEQ ID NO: 8585 - RNA, 19 nt, Artificial Sequence
  Description of Artificial Sequence: Synthetic oligonucleotide
gccgcgggcuaccugcagg

SEQ ID NO: 8586 - RNA, 19 nt, Artificial Sequence
  Description of Artificial Sequence: Synthetic oligonucleotide
ugccgcgggcuaccugcag

SEQ ID NO: 8587 - RNA, 19 nt, Artificial Sequence
  Description of Artificial Sequence: Synthetic oligonucleotide
augccgcgggcuaccugca

SEQ ID NO: 8588 - RNA, 19 nt, Artificial Sequence
  Description of Artificial Sequence: Synthetic oligonucleotide
caugccgcgggcuaccugc

SEQ ID NO: 8589 - RNA, 19 nt, Artificial Sequence
  Description of Artificial Sequence: Synthetic oligonucleotide
ccaugccgcgggcuaccug

SEQ ID NO: 8590 - RNA, 19 nt, Artificial Sequence
  Description of Artificial Sequence: Synthetic oligonucleotide
uccaugccgcgggcuaccu

SEQ ID NO: 8591 - RNA, 19 nt, Artificial Sequence
  Description of Artificial Sequence: Synthetic oligonucleotide
cuccaugccgcgggcuacc

SEQ ID NO: 8592 - RNA, 19 nt, Artificial Sequence
  Description of Artificial Sequence: Synthetic oligonucleotide
acuccaugccgcgggcuac

SEQ ID NO: 8593 - RNA, 19 nt, Artificial Sequence
  Description of Artificial Sequence: Synthetic oligonucleotide
uacuccaugccgcgggcua

SEQ ID NO: 8594 - RNA, 19 nt, Artificial Sequence
  Description of Artificial Sequence: Synthetic oligonucleotide
guacuccaugccgcgggcu

SEQ ID NO: 8595 - RNA, 19 nt, Artificial Sequence
  Description of Artificial Sequence: Synthetic oligonucleotide
gguacuccaugccgcgggc

SEQ ID NO: 8596 - RNA, 19 nt, Artificial Sequence
  Description of Artificial Sequence: Synthetic oligonucleotide
agguacuccaugccgcggg

SEQ ID NO: 8597 - RNA, 19 nt, Artificial Sequence
  Description of Artificial Sequence: Synthetic oligonucleotide
cagguacuccaugccgcgg

SEQ ID NO: 8598 - RNA, 19 nt, Artificial Sequence
  Description of Artificial Sequence: Synthetic oligonucleotide
ccagguacuccaugccgcg

SEQ ID NO: 8599 - RNA, 19 nt, Artificial Sequence
  Description of Artificial Sequence: Synthetic oligonucleotide
gccagguacuccaugccgc

SEQ ID NO: 8600 - RNA, 19 nt, Artificial Sequence
  Description of Artificial Sequence: Synthetic oligonucleotide
ugccagguacuccaugccg

SEQ ID NO: 8601 - RNA, 19 nt, Artificial Sequence
  Description of Artificial Sequence: Synthetic oligonucleotide
cugccagguacuccaugcc

SEQ ID NO: 8602 - RNA, 19 nt, Artificial Sequence
  Description of Artificial Sequence: Synthetic oligonucleotide
ucugccagguacuccaugc

SEQ ID NO: 8603 - RNA, 19 nt, Artificial Sequence
  Description of Artificial Sequence: Synthetic oligonucleotide
cucugccagguacuccaug

SEQ ID NO: 8604 - RNA, 19 nt, Artificial Sequence
  Description of Artificial Sequence: Synthetic oligonucleotide
gcucugccagguacuccau

SEQ ID NO: 8605 - RNA, 19 nt, Artificial Sequence
  Description of Artificial Sequence: Synthetic oligonucleotide
ugcucugccagguacucca

SEQ ID NO: 8606 - RNA, 19 nt, Artificial Sequence
  Description of Artificial Sequence: Synthetic oligonucleotide
cugcucugccagguacucc

SEQ ID NO: 8607 - RNA, 19 nt, Artificial Sequence
  Description of Artificial Sequence: Synthetic oligonucleotide
ucugcucugccagguacuc

SEQ ID NO: 8608 - RNA, 19 nt, Artificial Sequence
  Description of Artificial Sequence: Synthetic oligonucleotide
uucugcucugccagguacu

SEQ ID NO: 8609 - RNA, 19 nt, Artificial Sequence
  Description of Artificial Sequence: Synthetic oligonucleotide
cuucugcucugccagguac

SEQ ID NO: 8610 - RNA, 19 nt, Artificial Sequence
  Description of Artificial Sequence: Synthetic oligonucleotide
acuucugcucugccaggua

SEQ ID NO: 8611 - RNA, 19 nt, Artificial Sequence
  Description of Artificial Sequence: Synthetic oligonucleotide
aacuucugcucugccaggu

SEQ ID NO: 8612 - RNA, 19 nt, Artificial Sequence
  Description of Artificial Sequence: Synthetic oligonucleotide
aaacuucugcucugccagg

SEQ ID NO: 8613 - RNA, 19 nt, Artificial Sequence
  Description of Artificial Sequence: Synthetic oligonucleotide
caaacuucugcucugccag

SEQ ID NO: 8614 - RNA, 19 nt, Artificial Sequence
  Description of Artificial Sequence: Synthetic oligonucleotide
acaaacuucugcucugcca

SEQ ID NO: 8615 - RNA, 19 nt, Artificial Sequence
  Description of Artificial Sequence: Synthetic oligonucleotide
cacaaacuucugcucugcc

SEQ ID NO: 8616 - RNA, 19 nt, Artificial Sequence
  Description of Artificial Sequence: Synthetic oligonucleotide
gcacaaacuucugcucugc

SEQ ID NO: 8617 - RNA, 19 nt, Artificial Sequence
  Description of Artificial Sequence: Synthetic oligonucleotide
ugcacaaacuucugcucug

SEQ ID NO: 8618 - RNA, 19 nt, Artificial Sequence
  Description of Artificial Sequence: Synthetic oligonucleotide
gugcacaaacuucugcucu

SEQ ID NO: 8619 - RNA, 19 nt, Artificial Sequence
  Description of Artificial Sequence: Synthetic oligonucleotide
ugugcacaaacuucugcuc

SEQ ID NO: 8620 - RNA, 19 nt, Artificial Sequence
  Description of Artificial Sequence: Synthetic oligonucleotide
cugugcacaaacuucugcu

SEQ ID NO: 8621 - RNA, 19 nt, Artificial Sequence
  Description of Artificial Sequence: Synthetic oligonucleotide
ccugugcacaaacuucugc

SEQ ID NO: 8622 - RNA, 19 nt, Artificial Sequence
  Description of Artificial Sequence: Synthetic oligonucleotide
cccugugcacaaacuucug

SEQ ID NO: 8623 - RNA, 19 nt, Artificial Sequence
  Description of Artificial Sequence: Synthetic oligonucleotide
ucccugugcacaaacuucu

SEQ ID NO: 8624 - RNA, 19 nt, Artificial Sequence
  Description of Artificial Sequence: Synthetic oligonucleotide
gucccugugcacaaacuuc

SEQ ID NO: 8625 - RNA, 19 nt, Artificial Sequence
  Description of Artificial Sequence: Synthetic oligonucleotide
ggucccugugcacaaacuu

SEQ ID NO: 8626 - RNA, 19 nt, Artificial Sequence
  Description of Artificial Sequence: Synthetic oligonucleotide
aggucccugugcacaaacu

SEQ ID NO: 8627 - RNA, 19 nt, Artificial Sequence
  Description of Artificial Sequence: Synthetic oligonucleotide
caggucccugugcacaaac

SEQ ID NO: 8628 - RNA, 19 nt, Artificial Sequence
  Description of Artificial Sequence: Synthetic oligonucleotide
ccaggucccugugcacaaa

SEQ ID NO: 8629 - RNA, 19 nt, Artificial Sequence
  Description of Artificial Sequence: Synthetic oligonucleotide
gccaggucccugugcacaa

SEQ ID NO: 8630 - RNA, 19 nt, Artificial Sequence
  Description of Artificial Sequence: Synthetic oligonucleotide
agccaggucccugugcaca

SEQ ID NO: 8631 - RNA, 19 nt, Artificial Sequence
  Description of Artificial Sequence: Synthetic oligonucleotide
cagccaggucccugugcac

SEQ ID NO: 8632 - RNA, 19 nt, Artificial Sequence
  Description of Artificial Sequence: Synthetic oligonucleotide
gcagccaggucccugugca

SEQ ID NO: 8633 - RNA, 19 nt, Artificial Sequence
  Description of Artificial Sequence: Synthetic oligonucleotide
cgcagccaggucccugugc

SEQ ID NO: 8634 - RNA, 19 nt, Artificial Sequence
  Description of Artificial Sequence: Synthetic oligonucleotide
gcgcagccaggucccugug

SEQ ID NO: 8635 - RNA, 19 nt, Artificial Sequence
  Description of Artificial Sequence: Synthetic oligonucleotide
cgcgcagccaggucccugu

SEQ ID NO: 8636 - RNA, 19 nt, Artificial Sequence
  Description of Artificial Sequence: Synthetic oligonucleotide
ccgcgcagccaggucccug

SEQ ID NO: 8637 - RNA, 19 nt, Artificial Sequence
  Description of Artificial Sequence: Synthetic oligonucleotide
uccgcgcagccaggucccu

SEQ ID NO: 8638 - RNA, 19 nt, Artificial Sequence
  Description of Artificial Sequence: Synthetic oligonucleotide
uuccgcgcagccagguccc

SEQ ID NO: 8639 - RNA, 19 nt, Artificial Sequence
  Description of Artificial Sequence: Synthetic oligonucleotide
guuccgcgcagccaggucc

SEQ ID NO: 8640 - RNA, 19 nt, Artificial Sequence
  Description of Artificial Sequence: Synthetic oligonucleotide
aguuccgcgcagccagguc

SEQ ID NO: 8641 - RNA, 19 nt, Artificial Sequence
  Description of Artificial Sequence: Synthetic oligonucleotide
caguuccgcgcagccaggu

SEQ ID NO: 8642 - RNA, 19 nt, Artificial Sequence
  Description of Artificial Sequence: Synthetic oligonucleotide
gcaguuccgcgcagccagg

SEQ ID NO: 8643 - RNA, 19 nt, Artificial Sequence
  Description of Artificial Sequence: Synthetic oligonucleotide
ugcaguuccgcgcagccag

SEQ ID NO: 8644 - RNA, 19 nt, Artificial Sequence
  Description of Artificial Sequence: Synthetic oligonucleotide
augcaguuccgcgcagcca

SEQ ID NO: 8645 - RNA, 19 nt, Artificial Sequence
  Description of Artificial Sequence: Synthetic oligonucleotide
caugcaguuccgcgcagcc

SEQ ID NO: 8646 - RNA, 19 nt, Artificial Sequence
  Description of Artificial Sequence: Synthetic oligonucleotide
gcaugcaguuccgcgcagc

SEQ ID NO: 8647 - RNA, 19 nt, Artificial Sequence
  Description of Artificial Sequence: Synthetic oligonucleotide
agcaugcaguuccgcgcag

SEQ ID NO: 8648 - RNA, 19 nt, Artificial Sequence
  Description of Artificial Sequence: Synthetic oligonucleotide
cagcaugcaguuccgcgca

SEQ ID NO: 8649 - RNA, 19 nt, Artificial Sequence
  Description of Artificial Sequence: Synthetic oligonucleotide
ccagcaugcaguuccgcgc

SEQ ID NO: 8650 - RNA, 19 nt, Artificial Sequence
  Description of Artificial Sequence: Synthetic oligonucleotide
uccagcaugcaguuccgcg

SEQ ID NO: 8651 - RNA, 19 nt, Artificial Sequence
  Description of Artificial Sequence: Synthetic oligonucleotide
guccagcaugcaguuccgc

SEQ ID NO: 8652 - RNA, 19 nt, Artificial Sequence
  Description of Artificial Sequence: Synthetic oligonucleotide
cguccagcaugcaguuccg

SEQ ID NO: 8653 - RNA, 19 nt, Artificial Sequence
  Description of Artificial Sequence: Synthetic oligonucleotide
ucguccagcaugcaguucc

SEQ ID NO: 8654 - RNA, 19 nt, Artificial Sequence
  Description of Artificial Sequence: Synthetic oligonucleotide
cucguccagcaugcaguuc

SEQ ID NO: 8655 - RNA, 19 nt, Artificial Sequence
  Description of Artificial Sequence: Synthetic oligonucleotide
acucguccagcaugcaguu

SEQ ID NO: 8656 - RNA, 19 nt, Artificial Sequence
  Description of Artificial Sequence: Synthetic oligonucleotide
gacucguccagcaugcagu

SEQ ID NO: 8657 - RNA, 19 nt, Artificial Sequence
  Description of Artificial Sequence: Synthetic oligonucleotide
ugacucguccagcaugcag

SEQ ID NO: 8658 - RNA, 19 nt, Artificial Sequence
  Description of Artificial Sequence: Synthetic oligonucleotide
augacucguccagcaugca

SEQ ID NO: 8659 - RNA, 19 nt, Artificial Sequence
  Description of Artificial Sequence: Synthetic oligonucleotide
aaugacucguccagcaugc

SEQ ID NO: 8660 - RNA, 19 nt, Artificial Sequence
  Description of Artificial Sequence: Synthetic oligonucleotide
gaaugacucguccagcaug

SEQ ID NO: 8661 - RNA, 19 nt, Artificial Sequence
  Description of Artificial Sequence: Synthetic oligonucleotide
ugaaugacucguccagcau

SEQ ID NO: 8662 - RNA, 19 nt, Artificial Sequence
  Description of Artificial Sequence: Synthetic oligonucleotide
gugaaugacucguccagca

SEQ ID NO: 8663 - RNA, 19 nt, Artificial Sequence
  Description of Artificial Sequence: Synthetic oligonucleotide
ugugaaugacucguccagc

SEQ ID NO: 8664 - RNA, 19 nt, Artificial Sequence
  Description of Artificial Sequence: Synthetic oligonucleotide
cugugaaugacucguccag

SEQ ID NO: 8665 - RNA, 19 nt, Artificial Sequence
  Description of Artificial Sequence: Synthetic oligonucleotide
acugugaaugacucgucca

SEQ ID NO: 8666 - RNA, 19 nt, Artificial Sequence
  Description of Artificial Sequence: Synthetic oligonucleotide
gacugugaaugacucgucc

SEQ ID NO: 8667 - RNA, 19 nt, Artificial Sequence
  Description of Artificial Sequence: Synthetic oligonucleotide
ugacugugaaugacucguc

SEQ ID NO: 8668 - RNA, 19 nt, Artificial Sequence
  Description of Artificial Sequence: Synthetic oligonucleotide
uugacugugaaugacucgu

SEQ ID NO: 8669 - RNA, 19 nt, Artificial Sequence
  Description of Artificial Sequence: Synthetic oligonucleotide
cuugacugugaaugacucg

SEQ ID NO: 8670 - RNA, 19 nt, Artificial Sequence
  Description of Artificial Sequence: Synthetic oligonucleotide
ccuugacugugaaugacuc

SEQ ID NO: 8671 - RNA, 19 nt, Artificial Sequence
  Description of Artificial Sequence: Synthetic oligonucleotide
accuugacugugaaugacu

SEQ ID NO: 8672 - RNA, 19 nt, Artificial Sequence
  Description of Artificial Sequence: Synthetic oligonucleotide
caccuugacugugaaugac

SEQ ID NO: 8673 - RNA, 19 nt, Artificial Sequence
  Description of Artificial Sequence: Synthetic oligonucleotide
ccaccuugacugugaauga

SEQ ID NO: 8674 - RNA, 19 nt, Artificial Sequence
  Description of Artificial Sequence: Synthetic oligonucleotide
gccaccuugacugugaaug

SEQ ID NO: 8675 - RNA, 19 nt, Artificial Sequence
  Description of Artificial Sequence: Synthetic oligonucleotide
agccaccuugacugugaau

SEQ ID NO: 8676 - RNA, 19 nt, Artificial Sequence
  Description of Artificial Sequence: Synthetic oligonucleotide
cagccaccuugacugugaa

SEQ ID NO: 8677 - RNA, 19 nt, Artificial Sequence
  Description of Artificial Sequence: Synthetic oligonucleotide
ucagccaccuugacuguga

SEQ ID NO: 8678 - RNA, 19 nt, Artificial Sequence
  Description of Artificial Sequence: Synthetic oligonucleotide
gucagccaccuugacugug

SEQ ID NO: 8679 - RNA, 19 nt, Artificial Sequence
  Description of Artificial Sequence: Synthetic oligonucleotide
agucagccaccuugacugu

SEQ ID NO: 8680 - RNA, 19 nt, Artificial Sequence
  Description of Artificial Sequence: Synthetic oligonucleotide
aagucagccaccuugacug

SEQ ID NO: 8681 - RNA, 19 nt, Artificial Sequence
  Description of Artificial Sequence: Synthetic oligonucleotide
aaagucagccaccuugacu

SEQ ID NO: 8682 - RNA, 19 nt, Artificial Sequence
  Description of Artificial Sequence: Synthetic oligonucleotide
caaagucagccaccuugac

SEQ ID NO: 8683 - RNA, 19 nt, Artificial Sequence
  Description of Artificial Sequence: Synthetic oligonucleotide
ccaaagucagccaccuuga

SEQ ID NO: 8684 - RNA, 19 nt, Artificial Sequence
  Description of Artificial Sequence: Synthetic oligonucleotide
accaaagucagccaccuug

SEQ ID NO: 8685 - RNA, 19 nt, Artificial Sequence
  Description of Artificial Sequence: Synthetic oligonucleotide
aaccaaagucagccaccuu

SEQ ID NO: 8686 - RNA, 19 nt, Artificial Sequence
  Description of Artificial Sequence: Synthetic oligonucleotide
aaaccaaagucagccaccu

SEQ ID NO: 8687 - RNA, 19 nt, Artificial Sequence
  Description of Artificial Sequence: Synthetic oligonucleotide
caaaccaaagucagccacc

SEQ ID NO: 8688 - RNA, 19 nt, Artificial Sequence
  Description of Artificial Sequence: Synthetic oligonucleotide
ccaaaccaaagucagccac

SEQ ID NO: 8689 - RNA, 19 nt, Artificial Sequence
  Description of Artificial Sequence: Synthetic oligonucleotide
gccaaaccaaagucagcca

SEQ ID NO: 8690 - RNA, 19 nt, Artificial Sequence
  Description of Artificial Sequence: Synthetic oligonucleotide
ggccaaaccaaagucagcc

SEQ ID NO: 8691 - RNA, 19 nt, Artificial Sequence
  Description of Artificial Sequence: Synthetic oligonucleotide
gggccaaaccaaagucagc

SEQ ID NO: 8692 - RNA, 19 nt, Artificial Sequence
  Description of Artificial Sequence: Synthetic oligonucleotide
cgggccaaaccaaagucag

SEQ ID NO: 8693 - RNA, 19 nt, Artificial Sequence
  Description of Artificial Sequence: Synthetic oligonucleotide
gcgggccaaaccaaaguca

SEQ ID NO: 8694 - RNA, 19 nt, Artificial Sequence
  Description of Artificial Sequence: Synthetic oligonucleotide
cgcgggccaaaccaaaguc

SEQ ID NO: 8695 - RNA, 19 nt, Artificial Sequence
  Description of Artificial Sequence: Synthetic oligonucleotide
ucgcgggccaaaccaaagu

SEQ ID NO: 8696 - RNA, 19 nt, Artificial Sequence
  Description of Artificial Sequence: Synthetic oligonucleotide
gucgcgggccaaaccaaag

SEQ ID NO: 8697 - RNA, 19 nt, Artificial Sequence
  Description of Artificial Sequence: Synthetic oligonucleotide
ugucgcgggccaaaccaaa

SEQ ID NO: 8698 - RNA, 19 nt, Artificial Sequence
  Description of Artificial Sequence: Synthetic oligonucleotide
augucgcgggccaaaccaa

SEQ ID NO: 8699 - RNA, 19 nt, Artificial Sequence
  Description of Artificial Sequence: Synthetic oligonucleotide
gaugucgcgggccaaacca

SEQ ID NO: 8700 - RNA, 19 nt, Artificial Sequence
  Description of Artificial Sequence: Synthetic oligonucleotide
ggaugucgcgggccaaacc

SEQ ID NO: 8701 - RNA, 19 nt, Artificial Sequence
  Description of Artificial Sequence: Synthetic oligonucleotide
aggaugucgcgggccaaac

SEQ ID NO: 8702 - RNA, 19 nt, Artificial Sequence
  Description of Artificial Sequence: Synthetic oligonucleotide
caggaugucgcgggccaaa

SEQ ID NO: 8703 - RNA, 19 nt, Artificial Sequence
  Description of Artificial Sequence: Synthetic oligonucleotide
ccaggaugucgcgggccaa

SEQ ID NO: 8704 - RNA, 19 nt, Artificial Sequence
  Description of Artificial Sequence: Synthetic oligonucleotide
uccaggaugucgcgggcca

SEQ ID NO: 8705 - RNA, 19 nt, Artificial Sequence
  Description of Artificial Sequence: Synthetic oligonucleotide
guccaggaugucgcgggcc

SEQ ID NO: 8706 - RNA, 19 nt, Artificial Sequence
  Description of Artificial Sequence: Synthetic oligonucleotide
uguccaggaugucgcgggc

SEQ ID NO: 8707 - RNA, 19 nt, Artificial Sequence
  Description of Artificial Sequence: Synthetic oligonucleotide
cuguccaggaugucgcggg

SEQ ID NO: 8708 - RNA, 19 nt, Artificial Sequence
  Description of Artificial Sequence: Synthetic oligonucleotide
ccuguccaggaugucgcgg

SEQ ID NO: 8709 - RNA, 19 nt, Artificial Sequence
  Description of Artificial Sequence: Synthetic oligonucleotide
cccuguccaggaugucgcg

SEQ ID NO: 8710 - RNA, 19 nt, Artificial Sequence
  Description of Artificial Sequence: Synthetic oligonucleotide
ucccuguccaggaugucgc

SEQ ID NO: 8711 - RNA, 19 nt, Artificial Sequence
  Description of Artificial Sequence: Synthetic oligonucleotide
cucccuguccaggaugucg

SEQ ID NO: 8712 - RNA, 19 nt, Artificial Sequence
  Description of Artificial Sequence: Synthetic oligonucleotide
acucccuguccaggauguc

SEQ ID NO: 8713 - RNA, 19 nt, Artificial Sequence
  Description of Artificial Sequence: Synthetic oligonucleotide
uacucccuguccaggaugu

SEQ ID NO: 8714 - RNA, 19 nt, Artificial Sequence
  Description of Artificial Sequence: Synthetic oligonucleotide
guacucccuguccaggaug

SEQ ID NO: 8715 - RNA, 19 nt, Artificial Sequence
  Description of Artificial Sequence: Synthetic oligonucleotide
aguacucccuguccaggau

SEQ ID NO: 8716 - RNA, 19 nt, Artificial Sequence
  Description of Artificial Sequence: Synthetic oligonucleotide
uaguacucccuguccagga

SEQ ID NO: 8717 - RNA, 19 nt, Artificial Sequence
  Description of Artificial Sequence: Synthetic oligonucleotide
auaguacucccuguccagg

SEQ ID NO: 8718 - RNA, 19 nt, Artificial Sequence
  Description of Artificial Sequence: Synthetic oligonucleotide
uauaguacucccuguccag

SEQ ID NO: 8719 - RNA, 19 nt, Artificial Sequence
  Description of Artificial Sequence: Synthetic oligonucleotide
cuauaguacucccugucca

SEQ ID NO: 8720 - RNA, 19 nt, Artificial Sequence
  Description of Artificial Sequence: Synthetic oligonucleotide
acuauaguacucccugucc

SEQ ID NO: 8721 - RNA, 19 nt, Artificial Sequence
  Description of Artificial Sequence: Synthetic oligonucleotide
cacuauaguacucccuguc

SEQ ID NO: 8722 - RNA, 19 nt, Artificial Sequence
  Description of Artificial Sequence: Synthetic oligonucleotide
acacuauaguacucccugu

SEQ ID NO: 8723 - RNA, 19 nt, Artificial Sequence
  Description of Artificial Sequence: Synthetic oligonucleotide
aacacuauaguacucccug

SEQ ID NO: 8724 - RNA, 19 nt, Artificial Sequence
  Description of Artificial Sequence: Synthetic oligonucleotide
gaacacuauaguacucccu

SEQ ID NO: 8725 - RNA, 19 nt, Artificial Sequence
  Description of Artificial Sequence: Synthetic oligonucleotide
ugaacacuauaguacuccc

SEQ ID NO: 8726 - RNA, 19 nt, Artificial Sequence
  Description of Artificial Sequence: Synthetic oligonucleotide
uugaacacuauaguacucc

SEQ ID NO: 8727 - RNA, 19 nt, Artificial Sequence
  Description of Artificial Sequence: Synthetic oligonucleotide
guugaacacuauaguacuc

SEQ ID NO: 8728 - RNA, 19 nt, Artificial Sequence
  Description of Artificial Sequence: Synthetic oligonucleotide
uguugaacacuauaguacu

SEQ ID NO: 8729 - RNA, 19 nt, Artificial Sequence
  Description of Artificial Sequence: Synthetic oligonucleotide
cuguugaacacuauaguac

SEQ ID NO: 8730 - RNA, 19 nt, Artificial Sequence
  Description of Artificial Sequence: Synthetic oligonucleotide
gcuguugaacacuauagua

SEQ ID NO: 8731 - RNA, 19 nt, Artificial Sequence
  Description of Artificial Sequence: Synthetic oligonucleotide
ugcuguugaacacuauagu

SEQ ID NO: 8732 - RNA, 19 nt, Artificial Sequence
  Description of Artificial Sequence: Synthetic oligonucleotide
augcuguugaacacuauag

SEQ ID NO: 8733 - RNA, 19 nt, Artificial Sequence
  Description of Artificial Sequence: Synthetic oligonucleotide
gaugcuguugaacacuaua

SEQ ID NO: 8734 - RNA, 19 nt, Artificial Sequence
  Description of Artificial Sequence: Synthetic oligonucleotide
cgaugcuguugaacacuau

SEQ ID NO: 8735 - RNA, 19 nt, Artificial Sequence
  Description of Artificial Sequence: Synthetic oligonucleotide
gcgaugcuguugaacacua

SEQ ID NO: 8736 - RNA, 19 nt, Artificial Sequence
  Description of Artificial Sequence: Synthetic oligonucleotide
ggcgaugcuguugaacacu

SEQ ID NO: 8737 - RNA, 19 nt, Artificial Sequence
  Description of Artificial Sequence: Synthetic oligonucleotide
uggcgaugcuguugaacac

SEQ ID NO: 8738 - RNA, 19 nt, Artificial Sequence
  Description of Artificial Sequence: Synthetic oligonucleotide
guggcgaugcuguugaaca

SEQ ID NO: 8739 - RNA, 19 nt, Artificial Sequence
  Description of Artificial Sequence: Synthetic oligonucleotide
cguggcgaugcuguugaac

SEQ ID NO: 8740 - RNA, 19 nt, Artificial Sequence
  Description of Artificial Sequence: Synthetic oligonucleotide
gcguggcgaugcuguugaa

SEQ ID NO: 8741 - RNA, 19 nt, Artificial Sequence
  Description of Artificial Sequence: Synthetic oligonucleotide
agcguggcgaugcuguuga

SEQ ID NO: 8742 - RNA, 19 nt, Artificial Sequence
  Description of Artificial Sequence: Synthetic oligonucleotide
gagcguggcgaugcuguug

SEQ ID NO: 8743 - RNA, 19 nt, Artificial Sequence
  Description of Artificial Sequence: Synthetic oligonucleotide
cgagcguggcgaugcuguu

SEQ ID NO: 8744 - RNA, 19 nt, Artificial Sequence
  Description of Artificial Sequence: Synthetic oligonucleotide
gcgagcguggcgaugcugu

SEQ ID NO: 8745 - RNA, 19 nt, Artificial Sequence
  Description of Artificial Sequence: Synthetic oligonucleotide
ggcgagcguggcgaugcug

SEQ ID NO: 8746 - RNA, 19 nt, Artificial Sequence
  Description of Artificial Sequence: Synthetic oligonucleotide
aggcgagcguggcgaugcu

SEQ ID NO: 8747 - RNA, 19 nt, Artificial Sequence
  Description of Artificial Sequence: Synthetic oligonucleotide
uaggcgagcguggcgaugc

SEQ ID NO: 8748 - RNA, 19 nt, Artificial Sequence
  Description of Artificial Sequence: Synthetic oligonucleotide
guaggcgagcguggcgaug

SEQ ID NO: 8749 - RNA, 19 nt, Artificial Sequence
  Description of Artificial Sequence: Synthetic oligonucleotide
gguaggcgagcguggcgau

SEQ ID NO: 8750 - RNA, 19 nt, Artificial Sequence
  Description of Artificial Sequence: Synthetic oligonucleotide
agguaggcgagcguggcga

SEQ ID NO: 8751 - RNA, 19 nt, Artificial Sequence
  Description of Artificial Sequence: Synthetic oligonucleotide
cagguaggcgagcguggcg

SEQ ID NO: 8752 - RNA, 19 nt, Artificial Sequence
  Description of Artificial Sequence: Synthetic oligonucleotide
acagguaggcgagcguggc

SEQ ID NO: 8753 - RNA, 19 nt, Artificial Sequence
  Description of Artificial Sequence: Synthetic oligonucleotide
cacagguaggcgagcgugg

SEQ ID NO: 8754 - RNA, 19 nt, Artificial Sequence
  Description of Artificial Sequence: Synthetic oligonucleotide
ucacagguaggcgagcgug

SEQ ID NO: 8755 - RNA, 19 nt, Artificial Sequence
  Description of Artificial Sequence: Synthetic oligonucleotide
uucacagguaggcgagcgu

SEQ ID NO: 8756 - RNA, 19 nt, Artificial Sequence
  Description of Artificial Sequence: Synthetic oligonucleotide
cuucacagguaggcgagcg

SEQ ID NO: 8757 - RNA, 19 nt, Artificial Sequence
  Description of Artificial Sequence: Synthetic oligonucleotide
acuucacagguaggcgagc

SEQ ID NO: 8758 - RNA, 19 nt, Artificial Sequence
  Description of Artificial Sequence: Synthetic oligonucleotide
cacuucacagguaggcgag

SEQ ID NO: 8759 - RNA, 19 nt, Artificial Sequence
  Description of Artificial Sequence: Synthetic oligonucleotide
ccacuucacagguaggcga

SEQ ID NO: 8760 - RNA, 19 nt, Artificial Sequence
  Description of Artificial Sequence: Synthetic oligonucleotide
uccacuucacagguaggcg

SEQ ID NO: 8761 - RNA, 19 nt, Artificial Sequence
  Description of Artificial Sequence: Synthetic oligonucleotide
auccacuucacagguaggc

SEQ ID NO: 8762 - RNA, 19 nt, Artificial Sequence
  Description of Artificial Sequence: Synthetic oligonucleotide
cauccacuucacagguagg

SEQ ID NO: 8763 - RNA, 19 nt, Artificial Sequence
  Description of Artificial Sequence: Synthetic oligonucleotide
ccauccacuucacagguag

SEQ ID NO: 8764 - RNA, 19 nt, Artificial Sequence
  Description of Artificial Sequence: Synthetic oligonucleotide
gccauccacuucacaggua

SEQ ID NO: 8765 - RNA, 19 nt, Artificial Sequence
  Description of Artificial Sequence: Synthetic oligonucleotide
cgccauccacuucacaggu

SEQ ID NO: 8766 - RNA, 19 nt, Artificial Sequence
  Description of Artificial Sequence: Synthetic oligonucleotide
gcgccauccacuucacagg

SEQ ID NO: 8767 - RNA, 19 nt, Artificial Sequence
  Description of Artificial Sequence: Synthetic oligonucleotide
agcgccauccacuucacag

SEQ ID NO: 8768 - RNA, 19 nt, Artificial Sequence
  Description of Artificial Sequence: Synthetic oligonucleotide
cagcgccauccacuucaca

SEQ ID NO: 8769 - RNA, 19 nt, Artificial Sequence
  Description of Artificial Sequence: Synthetic oligonucleotide
ccagcgccauccacuucac

SEQ ID NO: 8770 - RNA, 19 nt, Artificial Sequence
  Description of Artificial Sequence: Synthetic oligonucleotide
uccagcgccauccacuuca

SEQ ID NO: 8771 - RNA, 19 nt, Artificial Sequence
  Description of Artificial Sequence: Synthetic oligonucleotide
cuccagcgccauccacuuc

SEQ ID NO: 8772 - RNA, 19 nt, Artificial Sequence
  Description of Artificial Sequence: Synthetic oligonucleotide
ucuccagcgccauccacuu

SEQ ID NO: 8773 - RNA, 19 nt, Artificial Sequence
  Description of Artificial Sequence: Synthetic oligonucleotide
cucuccagcgccauccacu

SEQ ID NO: 8774 - RNA, 19 nt, Artificial Sequence
  Description of Artificial Sequence: Synthetic oligonucleotide
gcucuccagcgccauccac

SEQ ID NO: 8775 - RNA, 19 nt, Artificial Sequence
  Description of Artificial Sequence: Synthetic oligonucleotide
ggcucuccagcgccaucca

SEQ ID NO: 8776 - RNA, 19 nt, Artificial Sequence
  Description of Artificial Sequence: Synthetic oligonucleotide
aggcucuccagcgccaucc

SEQ ID NO: 8777 - RNA, 19 nt, Artificial Sequence
  Description of Artificial Sequence: Synthetic oligonucleotide
caggcucuccagcgccauc

SEQ ID NO: 8778 - RNA, 19 nt, Artificial Sequence
  Description of Artificial Sequence: Synthetic oligonucleotide
gcaggcucuccagcgccau

SEQ ID NO: 8779 - RNA, 19 nt, Artificial Sequence
  Description of Artificial Sequence: Synthetic oligonucleotide
ugcaggcucuccagcgcca

SEQ ID NO: 8780 - RNA, 19 nt, Artificial Sequence
  Description of Artificial Sequence: Synthetic oligonucleotide
cugcaggcucuccagcgcc

SEQ ID NO: 8781 - RNA, 19 nt, Artificial Sequence
  Description of Artificial Sequence: Synthetic oligonucleotide
ucugcaggcucuccagcgc

SEQ ID NO: 8782 - RNA, 19 nt, Artificial Sequence
  Description of Artificial Sequence: Synthetic oligonucleotide
gucugcaggcucuccagcg

SEQ ID NO: 8783 - RNA, 19 nt, Artificial Sequence
  Description of Artificial Sequence: Synthetic oligonucleotide
ggucugcaggcucuccagc

SEQ ID NO: 8784 - RNA, 19 nt, Artificial Sequence
  Description of Artificial Sequence: Synthetic oligonucleotide
aggucugcaggcucuccag

SEQ ID NO: 8785 - RNA, 19 nt, Artificial Sequence
  Description of Artificial Sequence: Synthetic oligonucleotide
uaggucugcaggcucucca

SEQ ID NO: 8786 - RNA, 19 nt, Artificial Sequence
  Description of Artificial Sequence: Synthetic oligonucleotide
auaggucugcaggcucucc

SEQ ID NO: 8787 - RNA, 19 nt, Artificial Sequence
  Description of Artificial Sequence: Synthetic oligonucleotide
uauaggucugcaggcucuc

SEQ ID NO: 8788 - RNA, 19 nt, Artificial Sequence
  Description of Artificial Sequence: Synthetic oligonucleotide
cuauaggucugcaggcucu

SEQ ID NO: 8789 - RNA, 19 nt, Artificial Sequence
  Description of Artificial Sequence: Synthetic oligonucleotide
ucuauaggucugcaggcuc

SEQ ID NO: 8790 - RNA, 19 nt, Artificial Sequence
  Description of Artificial Sequence: Synthetic oligonucleotide
aucuauaggucugcaggcu

SEQ ID NO: 8791 - RNA, 19 nt, Artificial Sequence
  Description of Artificial Sequence: Synthetic oligonucleotide
aaucuauaggucugcaggc

SEQ ID NO: 8792 - RNA, 19 nt, Artificial Sequence
  Description of Artificial Sequence: Synthetic oligonucleotide
aaaucuauaggucugcagg

SEQ ID NO: 8793 - RNA, 19 nt, Artificial Sequence
  Description of Artificial Sequence: Synthetic oligonucleotide
uaaaucuauaggucugcag

SEQ ID NO: 8794 - RNA, 19 nt, Artificial Sequence
  Description of Artificial Sequence: Synthetic oligonucleotide
guaaaucuauaggucugca

SEQ ID NO: 8795 - RNA, 19 nt, Artificial Sequence
  Description of Artificial Sequence: Synthetic oligonucleotide
gguaaaucuauaggucugc

SEQ ID NO: 8796 - RNA, 19 nt, Artificial Sequence
  Description of Artificial Sequence: Synthetic oligonucleotide
ugguaaaucuauaggucug

SEQ ID NO: 8797 - RNA, 19 nt, Artificial Sequence
  Description of Artificial Sequence: Synthetic oligonucleotide
gugguaaaucuauaggucu

SEQ ID NO: 8798 - RNA, 19 nt, Artificial Sequence
  Description of Artificial Sequence: Synthetic oligonucleotide
ggugguaaaucuauagguc

SEQ ID NO: 8799 - RNA, 19 nt, Artificial Sequence
  Description of Artificial Sequence: Synthetic oligonucleotide
uggugguaaaucuauaggu

SEQ ID NO: 8800 - RNA, 19 nt, Artificial Sequence
  Description of Artificial Sequence: Synthetic oligonucleotide
uuggugguaaaucuauagg

SEQ ID NO: 8801 - RNA, 19 nt, Artificial Sequence
  Description of Artificial Sequence: Synthetic oligonucleotide
cuuggugguaaaucuauag

SEQ ID NO: 8802 - RNA, 19 nt, Artificial Sequence
  Description of Artificial Sequence: Synthetic oligonucleotide
acuuggugguaaaucuaua

SEQ ID NO: 8803 - RNA, 19 nt, Artificial Sequence
  Description of Artificial Sequence: Synthetic oligonucleotide
gacuuggugguaaaucuau

SEQ ID NO: 8804 - RNA, 19 nt, Artificial Sequence
  Description of Artificial Sequence: Synthetic oligonucleotide
agacuuggugguaaaucua

SEQ ID NO: 8805 - RNA, 19 nt, Artificial Sequence
  Description of Artificial Sequence: Synthetic oligonucleotide
cagacuuggugguaaaucu

SEQ ID NO: 8806 - RNA, 19 nt, Artificial Sequence
  Description of Artificial Sequence: Synthetic oligonucleotide
ucagacuuggugguaaauc

SEQ ID NO: 8807 - RNA, 19 nt, Artificial Sequence
  Description of Artificial Sequence: Synthetic oligonucleotide
aucagacuuggugguaaau

SEQ ID NO: 8808 - RNA, 19 nt, Artificial Sequence
  Description of Artificial Sequence: Synthetic oligonucleotide
caucagacuuggugguaaa

SEQ ID NO: 8809 - RNA, 19 nt, Artificial Sequence
  Description of Artificial Sequence: Synthetic oligonucleotide
acaucagacuuggugguaa

SEQ ID NO: 8810 - RNA, 19 nt, Artificial Sequence
  Description of Artificial Sequence: Synthetic oligonucleotide
cacaucagacuugguggua

SEQ ID NO: 8811 - RNA, 19 nt, Artificial Sequence
  Description of Artificial Sequence: Synthetic oligonucleotide
acacaucagacuugguggu

SEQ ID NO: 8812 - RNA, 19 nt, Artificial Sequence
  Description of Artificial Sequence: Synthetic oligonucleotide
cacacaucagacuuggugg

SEQ ID NO: 8813 - RNA, 19 nt, Artificial Sequence
  Description of Artificial Sequence: Synthetic oligonucleotide
ccacacaucagacuuggug

SEQ ID NO: 8814 - RNA, 19 nt, Artificial Sequence
  Description of Artificial Sequence: Synthetic oligonucleotide
accacacaucagacuuggu

SEQ ID NO: 8815 - RNA, 19 nt, Artificial Sequence
  Description of Artificial Sequence: Synthetic oligonucleotide
gaccacacaucagacuugg

SEQ ID NO: 8816 - RNA, 19 nt, Artificial Sequence
  Description of Artificial Sequence: Synthetic oligonucleotide
ugaccacacaucagacuug

SEQ ID NO: 8817 - RNA, 19 nt, Artificial Sequence
  Description of Artificial Sequence: Synthetic oligonucleotide
augaccacacaucagacuu

SEQ ID NO: 8818 - RNA, 19 nt, Artificial Sequence
  Description of Artificial Sequence: Synthetic oligonucleotide
aaugaccacacaucagacu

SEQ ID NO: 8819 - RNA, 19 nt, Artificial Sequence
  Description of Artificial Sequence: Synthetic oligonucleotide
aaaugaccacacaucagac

SEQ ID NO: 8820 - RNA, 19 nt, Artificial Sequence
  Description of Artificial Sequence: Synthetic oligonucleotide
caaaugaccacacaucaga

SEQ ID NO: 8821 - RNA, 19 nt, Artificial Sequence
  Description of Artificial Sequence: Synthetic oligonucleotide
ccaaaugaccacacaucag

SEQ ID NO: 8822 - RNA, 19 nt, Artificial Sequence
  Description of Artificial Sequence: Synthetic oligonucleotide
accaaaugaccacacauca

SEQ ID NO: 8823 - RNA, 19 nt, Artificial Sequence
  Description of Artificial Sequence: Synthetic oligonucleotide
caccaaaugaccacacauc

SEQ ID NO: 8824 - RNA, 19 nt, Artificial Sequence
  Description of Artificial Sequence: Synthetic oligonucleotide
acaccaaaugaccacacau

SEQ ID NO: 8825 - RNA, 19 nt, Artificial Sequence
  Description of Artificial Sequence: Synthetic oligonucleotide
cacaccaaaugaccacaca

SEQ ID NO: 8826 - RNA, 19 nt, Artificial Sequence
  Description of Artificial Sequence: Synthetic oligonucleotide
gcacaccaaaugaccacac

SEQ ID NO: 8827 - RNA, 19 nt, Artificial Sequence
  Description of Artificial Sequence: Synthetic oligonucleotide
agcacaccaaaugaccaca

SEQ ID NO: 8828 - RNA, 19 nt, Artificial Sequence
  Description of Artificial Sequence: Synthetic oligonucleotide
cagcacaccaaaugaccac

SEQ ID NO: 8829 - RNA, 19 nt, Artificial Sequence
  Description of Artificial Sequence: Synthetic oligonucleotide
gcagcacaccaaaugacca

SEQ ID NO: 8830 - RNA, 19 nt, Artificial Sequence
  Description of Artificial Sequence: Synthetic oligonucleotide
agcagcacaccaaaugacc

SEQ ID NO: 8831 - RNA, 19 nt, Artificial Sequence
  Description of Artificial Sequence: Synthetic oligonucleotide
cagcagcacaccaaaugac

SEQ ID NO: 8832 - RNA, 19 nt, Artificial Sequence
  Description of Artificial Sequence: Synthetic oligonucleotide
acagcagcacaccaaauga

SEQ ID NO: 8833 - RNA, 19 nt, Artificial Sequence
  Description of Artificial Sequence: Synthetic oligonucleotide
cacagcagcacaccaaaug

SEQ ID NO: 8834 - RNA, 19 nt, Artificial Sequence
  Description of Artificial Sequence: Synthetic oligonucleotide
ccacagcagcacaccaaau

SEQ ID NO: 8835 - RNA, 19 nt, Artificial Sequence
  Description of Artificial Sequence: Synthetic oligonucleotide
cccacagcagcacaccaaa

SEQ ID NO: 8836 - RNA, 19 nt, Artificial Sequence
  Description of Artificial Sequence: Synthetic oligonucleotide
ucccacagcagcacaccaa

SEQ ID NO: 8837 - RNA, 19 nt, Artificial Sequence
  Description of Artificial Sequence: Synthetic oligonucleotide
uucccacagcagcacacca

SEQ ID NO: 8838 - RNA, 19 nt, Artificial Sequence
  Description of Artificial Sequence: Synthetic oligonucleotide
guucccacagcagcacacc

SEQ ID NO: 8839 - RNA, 19 nt, Artificial Sequence
  Description of Artificial Sequence: Synthetic oligonucleotide
aguucccacagcagcacac

SEQ ID NO: 8840 - RNA, 19 nt, Artificial Sequence
  Description of Artificial Sequence: Synthetic oligonucleotide
caguucccacagcagcaca

SEQ ID NO: 8841 - RNA, 19 nt, Artificial Sequence
  Description of Artificial Sequence: Synthetic oligonucleotide
gcaguucccacagcagcac

SEQ ID NO: 8842 - RNA, 19 nt, Artificial Sequence
  Description of Artificial Sequence: Synthetic oligonucleotide
agcaguucccacagcagca

SEQ ID NO: 8843 - RNA, 19 nt, Artificial Sequence
  Description of Artificial Sequence: Synthetic oligonucleotide
cagcaguucccacagcagc

SEQ ID NO: 8844 - RNA, 19 nt, Artificial Sequence
  Description of Artificial Sequence: Synthetic oligonucleotide
ucagcaguucccacagcag

SEQ ID NO: 8845 - RNA, 19 nt, Artificial Sequence
  Description of Artificial Sequence: Synthetic oligonucleotide
gucagcaguucccacagca

SEQ ID NO: 8846 - RNA, 19 nt, Artificial Sequence
  Description of Artificial Sequence: Synthetic oligonucleotide
ugucagcaguucccacagc

SEQ ID NO: 8847 - RNA, 19 nt, Artificial Sequence
  Description of Artificial Sequence: Synthetic oligonucleotide
gugucagcaguucccacag

SEQ ID NO: 8848 - RNA, 19 nt, Artificial Sequence
  Description of Artificial Sequence: Synthetic oligonucleotide
cgugucagcaguucccaca

SEQ ID NO: 8849 - RNA, 19 nt, Artificial Sequence
  Description of Artificial Sequence: Synthetic oligonucleotide
ccgugucagcaguucccac

SEQ ID NO: 8850 - RNA, 19 nt, Artificial Sequence
  Description of Artificial Sequence: Synthetic oligonucleotide
cccgugucagcaguuccca

SEQ ID NO: 8851 - RNA, 19 nt, Artificial Sequence
  Description of Artificial Sequence: Synthetic oligonucleotide
ccccgugucagcaguuccc

SEQ ID NO: 8852 - RNA, 19 nt, Artificial Sequence
  Description of Artificial Sequence: Synthetic oligonucleotide
accccgugucagcaguucc

SEQ ID NO: 8853 - RNA, 19 nt, Artificial Sequence
  Description of Artificial Sequence: Synthetic oligonucleotide
caccccgugucagcaguuc

SEQ ID NO: 8854 - RNA, 19 nt, Artificial Sequence
  Description of Artificial Sequence: Synthetic oligonucleotide
gcaccccgugucagcaguu

SEQ ID NO: 8855 - RNA, 19 nt, Artificial Sequence
  Description of Artificial Sequence: Synthetic oligonucleotide
ggcaccccgugucagcagu

SEQ ID NO: 8856 - RNA, 19 nt, Artificial Sequence
  Description of Artificial Sequence: Synthetic oligonucleotide
gggcaccccgugucagcag

SEQ ID NO: 8857 - RNA, 19 nt, Artificial Sequence
  Description of Artificial Sequence: Synthetic oligonucleotide
ggggcaccccgugucagca

SEQ ID NO: 8858 - RNA, 19 nt, Artificial Sequence
  Description of Artificial Sequence: Synthetic oligonucleotide
uggggcaccccgugucagc

SEQ ID NO: 8859 - RNA, 19 nt, Artificial Sequence
  Description of Artificial Sequence: Synthetic oligonucleotide
guggggcaccccgugucag

SEQ ID NO: 8860 - RNA, 19 nt, Artificial Sequence
  Description of Artificial Sequence: Synthetic oligonucleotide
gguggggcaccccguguca

SEQ ID NO: 8861 - RNA, 19 nt, Artificial Sequence
  Description of Artificial Sequence: Synthetic oligonucleotide
ugguggggcaccccguguc

SEQ ID NO: 8862 - RNA, 19 nt, Artificial Sequence
  Description of Artificial Sequence: Synthetic oligonucleotide
augguggggcaccccgugu

SEQ ID NO: 8863 - RNA, 19 nt, Artificial Sequence
  Description of Artificial Sequence: Synthetic oligonucleotide
uaugguggggcaccccgug

SEQ ID NO: 8864 - RNA, 19 nt, Artificial Sequence
  Description of Artificial Sequence: Synthetic oligonucleotide
guaugguggggcaccccgu

SEQ ID NO: 8865 - RNA, 19 nt, Artificial Sequence
  Description of Artificial Sequence: Synthetic oligonucleotide
gguaugguggggcaccccg

SEQ ID NO: 8866 - RNA, 19 nt, Artificial Sequence
  Description of Artificial Sequence: Synthetic oligonucleotide
cgguaugguggggcacccc

SEQ ID NO: 8867 - RNA, 19 nt, Artificial Sequence
  Description of Artificial Sequence: Synthetic oligonucleotide
gcgguaugguggggcaccc

SEQ ID NO: 8868 - RNA, 19 nt, Artificial Sequence
  Description of Artificial Sequence: Synthetic oligonucleotide
ggcgguaugguggggcacc

SEQ ID NO: 8869 - RNA, 19 nt, Artificial Sequence
  Description of Artificial Sequence: Synthetic oligonucleotide
uggcgguaugguggggcac

SEQ ID NO: 8870 - RNA, 19 nt, Artificial Sequence
  Description of Artificial Sequence: Synthetic oligonucleotide
guggcgguaugguggggca

SEQ ID NO: 8871 - RNA, 19 nt, Artificial Sequence
  Description of Artificial Sequence: Synthetic oligonucleotide
uguggcgguaugguggggc

SEQ ID NO: 8872 - RNA, 19 nt, Artificial Sequence
  Description of Artificial Sequence: Synthetic oligonucleotide
auguggcgguauggugggg

SEQ ID NO: 8873 - RNA, 19 nt, Artificial Sequence
  Description of Artificial Sequence: Synthetic oligonucleotide
aauguggcgguaugguggg

SEQ ID NO: 8874 - RNA, 19 nt, Artificial Sequence
  Description of Artificial Sequence: Synthetic oligonucleotide
caauguggcgguauggugg

SEQ ID NO: 8875 - RNA, 19 nt, Artificial Sequence
  Description of Artificial Sequence: Synthetic oligonucleotide
ucaauguggcgguauggug

SEQ ID NO: 8876 - RNA, 19 nt, Artificial Sequence
  Description of Artificial Sequence: Synthetic oligonucleotide
gucaauguggcgguauggu

SEQ ID NO: 8877 - RNA, 19 nt, Artificial Sequence
  Description of Artificial Sequence: Synthetic oligonucleotide
ggucaauguggcgguaugg

SEQ ID NO: 8878 - RNA, 19 nt, Artificial Sequence
  Description of Artificial Sequence: Synthetic oligonucleotide
gggucaauguggcgguaug

SEQ ID NO: 8879 - RNA, 19 nt, Artificial Sequence
  Description of Artificial Sequence: Synthetic oligonucleotide
agggucaauguggcgguau

SEQ ID NO: 8880 - RNA, 19 nt, Artificial Sequence
  Description of Artificial Sequence: Synthetic oligonucleotide
aagggucaauguggcggua

SEQ ID NO: 8881 - RNA, 19 nt, Artificial Sequence
  Description of Artificial Sequence: Synthetic oligonucleotide
aaagggucaauguggcggu

SEQ ID NO: 8882 - RNA, 19 nt, Artificial Sequence
  Description of Artificial Sequence: Synthetic oligonucleotide
aaaagggucaauguggcgg

SEQ ID NO: 8883 - RNA, 19 nt, Artificial Sequence
  Description of Artificial Sequence: Synthetic oligonucleotide
caaaagggucaauguggcg

SEQ ID NO: 8884 - RNA, 19 nt, Artificial Sequence
  Description of Artificial Sequence: Synthetic oligonucleotide
ucaaaagggucaauguggc

SEQ ID NO: 8885 - RNA, 19 nt, Artificial Sequence
  Description of Artificial Sequence: Synthetic oligonucleotide
gucaaaagggucaaugugg

SEQ ID NO: 8886 - RNA, 19 nt, Artificial Sequence
  Description of Artificial Sequence: Synthetic oligonucleotide
ggucaaaagggucaaugug

SEQ ID NO: 8887 - RNA, 19 nt, Artificial Sequence
  Description of Artificial Sequence: Synthetic oligonucleotide
aggucaaaagggucaaugu

SEQ ID NO: 8888 - RNA, 19 nt, Artificial Sequence
  Description of Artificial Sequence: Synthetic oligonucleotide
aaggucaaaagggucaaug

SEQ ID NO: 8889 - RNA, 19 nt, Artificial Sequence
  Description of Artificial Sequence: Synthetic oligonucleotide
uaaggucaaaagggucaau

SEQ ID NO: 8890 - RNA, 19 nt, Artificial Sequence
  Description of Artificial Sequence: Synthetic oligonucleotide
guaaggucaaaagggucaa

SEQ ID NO: 8891 - RNA, 19 nt, Artificial Sequence
  Description of Artificial Sequence: Synthetic oligonucleotide
gguaaggucaaaaggguca

SEQ ID NO: 8892 - RNA, 19 nt, Artificial Sequence
  Description of Artificial Sequence: Synthetic oligonucleotide
ggguaaggucaaaaggguc

SEQ ID NO: 8893 - RNA, 19 nt, Artificial Sequence
  Description of Artificial Sequence: Synthetic oligonucleotide
uggguaaggucaaaagggu

SEQ ID NO: 8894 - RNA, 19 nt, Artificial Sequence
  Description of Artificial Sequence: Synthetic oligonucleotide
guggguaaggucaaaaggg

SEQ ID NO: 8895 - RNA, 19 nt, Artificial Sequence
  Description of Artificial Sequence: Synthetic oligonucleotide
aguggguaaggucaaaagg

SEQ ID NO: 8896 - RNA, 19 nt, Artificial Sequence
  Description of Artificial Sequence: Synthetic oligonucleotide
aaguggguaaggucaaaag

SEQ ID NO: 8897 - RNA, 19 nt, Artificial Sequence
  Description of Artificial Sequence: Synthetic oligonucleotide
gaaguggguaaggucaaaa

SEQ ID NO: 8898 - RNA, 19 nt, Artificial Sequence
  Description of Artificial Sequence: Synthetic oligonucleotide
ggaaguggguaaggucaaa

SEQ ID NO: 8899 - RNA, 19 nt, Artificial Sequence
  Description of Artificial Sequence: Synthetic oligonucleotide
aggaaguggguaaggucaa

SEQ ID NO: 8900 - RNA, 19 nt, Artificial Sequence
  Description of Artificial Sequence: Synthetic oligonucleotide
caggaaguggguaagguca

SEQ ID NO: 8901 - RNA, 19 nt, Artificial Sequence
  Description of Artificial Sequence: Synthetic oligonucleotide
ccaggaaguggguaagguc

SEQ ID NO: 8902 - RNA, 19 nt, Artificial Sequence
  Description of Artificial Sequence: Synthetic oligonucleotide
gccaggaaguggguaaggu

SEQ ID NO: 8903 - RNA, 19 nt, Artificial Sequence
  Description of Artificial Sequence: Synthetic oligonucleotide
ggccaggaaguggguaagg

SEQ ID NO: 8904 - RNA, 19 nt, Artificial Sequence
  Description of Artificial Sequence: Synthetic oligonucleotide
gggccaggaaguggguaag

SEQ ID NO: 8905 - RNA, 19 nt, Artificial Sequence
  Description of Artificial Sequence: Synthetic oligonucleotide
ugggccaggaaguggguaa

SEQ ID NO: 8906 - RNA, 19 nt, Artificial Sequence
  Description of Artificial Sequence: Synthetic oligonucleotide
cugggccaggaagugggua

SEQ ID NO: 8907 - RNA, 19 nt, Artificial Sequence
  Description of Artificial Sequence: Synthetic oligonucleotide
ccugggccaggaagugggu

SEQ ID NO: 8908 - RNA, 19 nt, Artificial Sequence
  Description of Artificial Sequence: Synthetic oligonucleotide
cccugggccaggaaguggg

SEQ ID NO: 8909 - RNA, 19 nt, Artificial Sequence
  Description of Artificial Sequence: Synthetic oligonucleotide
acccugggccaggaagugg

SEQ ID NO: 8910 - RNA, 19 nt, Artificial Sequence
  Description of Artificial Sequence: Synthetic oligonucleotide
gacccugggccaggaagug

SEQ ID NO: 8911 - RNA, 19 nt, Artificial Sequence
  Description of Artificial Sequence: Synthetic oligonucleotide
cgacccugggccaggaagu

SEQ ID NO: 8912 - RNA, 19 nt, Artificial Sequence
  Description of Artificial Sequence: Synthetic oligonucleotide
ccgacccugggccaggaag

SEQ ID NO: 8913 - RNA, 19 nt, Artificial Sequence
  Description of Artificial Sequence: Synthetic oligonucleotide
gccgacccugggccaggaa

SEQ ID NO: 8914 - RNA, 19 nt, Artificial Sequence
  Description of Artificial Sequence: Synthetic oligonucleotide
cgccgacccugggccagga

SEQ ID NO: 8915 - RNA, 19 nt, Artificial Sequence
  Description of Artificial Sequence: Synthetic oligonucleotide
gcgccgacccugggccagg

SEQ ID NO: 8916 - RNA, 19 nt, Artificial Sequence
  Description of Artificial Sequence: Synthetic oligonucleotide
ggcgccgacccugggccag

SEQ ID NO: 8917 - RNA, 19 nt, Artificial Sequence
  Description of Artificial Sequence: Synthetic oligonucleotide
aggcgccgacccugggcca

SEQ ID NO: 8918 - RNA, 19 nt, Artificial Sequence
  Description of Artificial Sequence: Synthetic oligonucleotide
caggcgccgacccugggcc

SEQ ID NO: 8919 - RNA, 19 nt, Artificial Sequence
  Description of Artificial Sequence: Synthetic oligonucleotide
gcaggcgccgacccugggc

SEQ ID NO: 8920 - RNA, 19 nt, Artificial Sequence
  Description of Artificial Sequence: Synthetic oligonucleotide
ggcaggcgccgacccuggg

SEQ ID NO: 8921 - RNA, 19 nt, Artificial Sequence
  Description of Artificial Sequence: Synthetic oligonucleotide
gggcaggcgccgacccugg

SEQ ID NO: 8922 - RNA, 19 nt, Artificial Sequence
  Description of Artificial Sequence: Synthetic oligonucleotide
ggggcaggcgccgacccug

SEQ ID NO: 8923 - RNA, 19 nt, Artificial Sequence
  Description of Artificial Sequence: Synthetic oligonucleotide
uggggcaggcgccgacccu

SEQ ID NO: 8924 - RNA, 19 nt, Artificial Sequence
  Description of Artificial Sequence: Synthetic oligonucleotide
cuggggcaggcgccgaccc

SEQ ID NO: 8925 - RNA, 19 nt, Artificial Sequence
  Description of Artificial Sequence: Synthetic oligonucleotide
gcuggggcaggcgccgacc

SEQ ID NO: 8926 - RNA, 19 nt, Artificial Sequence
  Description of Artificial Sequence: Synthetic oligonucleotide
ggcuggggcaggcgccgac

SEQ ID NO: 8927 - RNA, 19 nt, Artificial Sequence
  Description of Artificial Sequence: Synthetic oligonucleotide
aggcuggggcaggcgccga

SEQ ID NO: 8928 - RNA, 19 nt, Artificial Sequence
  Description of Artificial Sequence: Synthetic oligonucleotide
caggcuggggcaggcgccg

SEQ ID NO: 8929 - RNA, 19 nt, Artificial Sequence
  Description of Artificial Sequence: Synthetic oligonucleotide
ucaggcuggggcaggcgcc

SEQ ID NO: 8930 - RNA, 19 nt, Artificial Sequence
  Description of Artificial Sequence: Synthetic oligonucleotide
cucaggcuggggcaggcgc

SEQ ID NO: 8931 - RNA, 19 nt, Artificial Sequence
  Description of Artificial Sequence: Synthetic oligonucleotide
acucaggcuggggcaggcg

SEQ ID NO: 8932 - RNA, 19 nt, Artificial Sequence
  Description of Artificial Sequence: Synthetic oligonucleotide
uacucaggcuggggcaggc

SEQ ID NO: 8933 - RNA, 19 nt, Artificial Sequence
  Description of Artificial Sequence: Synthetic oligonucleotide
auacucaggcuggggcagg

SEQ ID NO: 8934 - RNA, 19 nt, Artificial Sequence
  Description of Artificial Sequence: Synthetic oligonucleotide
aauacucaggcuggggcag

SEQ ID NO: 8935 - RNA, 19 nt, Artificial Sequence
  Description of Artificial Sequence: Synthetic oligonucleotide
caauacucaggcuggggca

SEQ ID NO: 8936 - RNA, 19 nt, Artificial Sequence
  Description of Artificial Sequence: Synthetic oligonucleotide
gcaauacucaggcuggggc

SEQ ID NO: 8937 - RNA, 19 nt, Artificial Sequence
  Description of Artificial Sequence: Synthetic oligonucleotide
ggcaauacucaggcugggg

SEQ ID NO: 8938 - RNA, 19 nt, Artificial Sequence
  Description of Artificial Sequence: Synthetic oligonucleotide
gggcaauacucaggcuggg

SEQ ID NO: 8939 - RNA, 19 nt, Artificial Sequence
  Description of Artificial Sequence: Synthetic oligonucleotide
agggcaauacucaggcugg

SEQ ID NO: 8940 - RNA, 19 nt, Artificial Sequence
  Description of Artificial Sequence: Synthetic oligonucleotide
cagggcaauacucaggcug

SEQ ID NO: 8941 - RNA, 19 nt, Artificial Sequence
  Description of Artificial Sequence: Synthetic oligonucleotide
ucagggcaauacucaggcu

SEQ ID NO: 8942 - RNA, 19 nt, Artificial Sequence
  Description of Artificial Sequence: Synthetic oligonucleotide
aucagggcaauacucaggc

SEQ ID NO: 8943 - RNA, 19 nt, Artificial Sequence
  Description of Artificial Sequence: Synthetic oligonucleotide
aaucagggcaauacucagg

SEQ ID NO: 8944 - RNA, 19 nt, Artificial Sequence
  Description of Artificial Sequence: Synthetic oligonucleotide
gaaucagggcaauacucag

SEQ ID NO: 8945 - RNA, 19 nt, Artificial Sequence
  Description of Artificial Sequence: Synthetic oligonucleotide
agaaucagggcaauacuca

SEQ ID NO: 8946 - RNA, 19 nt, Artificial Sequence
  Description of Artificial Sequence: Synthetic oligonucleotide
gagaaucagggcaauacuc

SEQ ID NO: 8947 - RNA, 19 nt, Artificial Sequence
  Description of Artificial Sequence: Synthetic oligonucleotide
agagaaucagggcaauacu

SEQ ID NO: 8948 - RNA, 19 nt, Artificial Sequence
  Description of Artificial Sequence: Synthetic oligonucleotide
cagagaaucagggcaauac

SEQ ID NO: 8949 - RNA, 19 nt, Artificial Sequence
  Description of Artificial Sequence: Synthetic oligonucleotide
acagagaaucagggcaaua

SEQ ID NO: 8950 - RNA, 19 nt, Artificial Sequence
  Description of Artificial Sequence: Synthetic oligonucleotide
uacagagaaucagggcaau

SEQ ID NO: 8951 - RNA, 19 nt, Artificial Sequence
  Description of Artificial Sequence: Synthetic oligonucleotide
guacagagaaucagggcaa

SEQ ID NO: 8952 - RNA, 19 nt, Artificial Sequence
  Description of Artificial Sequence: Synthetic oligonucleotide
gguacagagaaucagggca

SEQ ID NO: 8953 - RNA, 19 nt, Artificial Sequence
  Description of Artificial Sequence: Synthetic oligonucleotide
ugguacagagaaucagggc

SEQ ID NO: 8954 - RNA, 19 nt, Artificial Sequence
  Description of Artificial Sequence: Synthetic oligonucleotide
uugguacagagaaucaggg

SEQ ID NO: 8955 - RNA, 19 nt, Artificial Sequence
  Description of Artificial Sequence: Synthetic oligonucleotide
cuugguacagagaaucagg

SEQ ID NO: 8956 - RNA, 19 nt, Artificial Sequence
  Description of Artificial Sequence: Synthetic oligonucleotide
acuugguacagagaaucag

SEQ ID NO: 8957 - RNA, 19 nt, Artificial Sequence
  Description of Artificial Sequence: Synthetic oligonucleotide
cacuugguacagagaauca

SEQ ID NO: 8958 - RNA, 19 nt, Artificial Sequence
  Description of Artificial Sequence: Synthetic oligonucleotide
ucacuugguacagagaauc

SEQ ID NO: 8959 - RNA, 19 nt, Artificial Sequence
  Description of Artificial Sequence: Synthetic oligonucleotide
aucacuugguacagagaau

SEQ ID NO: 8960 - RNA, 19 nt, Artificial Sequence
  Description of Artificial Sequence: Synthetic oligonucleotide
caucacuugguacagagaa

SEQ ID NO: 8961 - RNA, 19 nt, Artificial Sequence
  Description of Artificial Sequence: Synthetic oligonucleotide
gcaucacuugguacagaga

SEQ ID NO: 8962 - RNA, 19 nt, Artificial Sequence
  Description of Artificial Sequence: Synthetic oligonucleotide
ugcaucacuugguacagag

SEQ ID NO: 8963 - RNA, 19 nt, Artificial Sequence
  Description of Artificial Sequence: Synthetic oligonucleotide
cugcaucacuugguacaga

SEQ ID NO: 8964 - RNA, 19 nt, Artificial Sequence
  Description of Artificial Sequence: Synthetic oligonucleotide
gcugcaucacuugguacag

SEQ ID NO: 8965 - RNA, 19 nt, Artificial Sequence
  Description of Artificial Sequence: Synthetic oligonucleotide
ugcugcaucacuugguaca

SEQ ID NO: 8966 - RNA, 19 nt, Artificial Sequence
  Description of Artificial Sequence: Synthetic oligonucleotide
uugcugcaucacuugguac

SEQ ID NO: 8967 - RNA, 19 nt, Artificial Sequence
  Description of Artificial Sequence: Synthetic oligonucleotide
auugcugcaucacuuggua

SEQ ID NO: 8968 - RNA, 19 nt, Artificial Sequence
  Description of Artificial Sequence: Synthetic oligonucleotide
cauugcugcaucacuuggu

SEQ ID NO: 8969 - RNA, 19 nt, Artificial Sequence
  Description of Artificial Sequence: Synthetic oligonucleotide
gcauugcugcaucacuugg

SEQ ID NO: 8970 - RNA, 19 nt, Artificial Sequence
  Description of Artificial Sequence: Synthetic oligonucleotide
agcauugcugcaucacuug

SEQ ID NO: 8971 - RNA, 19 nt, Artificial Sequence
  Description of Artificial Sequence: Synthetic oligonucleotide
cagcauugcugcaucacuu

SEQ ID NO: 8972 - RNA, 19 nt, Artificial Sequence
  Description of Artificial Sequence: Synthetic oligonucleotide
ccagcauugcugcaucacu

SEQ ID NO: 8973 - RNA, 19 nt, Artificial Sequence
  Description of Artificial Sequence: Synthetic oligonucleotide
cccagcauugcugcaucac

SEQ ID NO: 8974 - RNA, 19 nt, Artificial Sequence
  Description of Artificial Sequence: Synthetic oligonucleotide
ucccagcauugcugcauca

SEQ ID NO: 8975 - RNA, 19 nt, Artificial Sequence
  Description of Artificial Sequence: Synthetic oligonucleotide
cucccagcauugcugcauc

SEQ ID NO: 8976 - RNA, 19 nt, Artificial Sequence
  Description of Artificial Sequence: Synthetic oligonucleotide
ccucccagcauugcugcau

SEQ ID NO: 8977 - RNA, 19 nt, Artificial Sequence
  Description of Artificial Sequence: Synthetic oligonucleotide
gccucccagcauugcugca

SEQ ID NO: 8978 - RNA, 19 nt, Artificial Sequence
  Description of Artificial Sequence: Synthetic oligonucleotide
ugccucccagcauugcugc

SEQ ID NO: 8979 - RNA, 19 nt, Artificial Sequence
  Description of Artificial Sequence: Synthetic oligonucleotide
cugccucccagcauugcug

SEQ ID NO: 8980 - RNA, 19 nt, Artificial Sequence
  Description of Artificial Sequence: Synthetic oligonucleotide
ucugccucccagcauugcu

SEQ ID NO: 8981 - RNA, 19 nt, Artificial Sequence
  Description of Artificial Sequence: Synthetic oligonucleotide
gucugccucccagcauugc

SEQ ID NO: 8982 - RNA, 19 nt, Artificial Sequence
  Description of Artificial Sequence: Synthetic oligonucleotide
ggucugccucccagcauug

SEQ ID NO: 8983 - RNA, 19 nt, Artificial Sequence
  Description of Artificial Sequence: Synthetic oligonucleotide
gggucugccucccagcauu

SEQ ID NO: 8984 - RNA, 19 nt, Artificial Sequence
  Description of Artificial Sequence: Synthetic oligonucleotide
ugggucugccucccagcau

SEQ ID NO: 8985 - RNA, 19 nt, Artificial Sequence
  Description of Artificial Sequence: Synthetic oligonucleotide
cugggucugccucccagca

SEQ ID NO: 8986 - RNA, 19 nt, Artificial Sequence
  Description of Artificial Sequence: Synthetic oligonucleotide
gcugggucugccucccagc

SEQ ID NO: 8987 - RNA, 19 nt, Artificial Sequence
  Description of Artificial Sequence: Synthetic oligonucleotide
ugcugggucugccucccag

SEQ ID NO: 8988 - RNA, 19 nt, Artificial Sequence
  Description of Artificial Sequence: Synthetic oligonucleotide
cugcugggucugccuccca

SEQ ID NO: 8989 - RNA, 19 nt, Artificial Sequence
  Description of Artificial Sequence: Synthetic oligonucleotide
acugcugggucugccuccc

SEQ ID NO: 8990 - RNA, 19 nt, Artificial Sequence
  Description of Artificial Sequence: Synthetic oligonucleotide
cacugcugggucugccucc

SEQ ID NO: 8991 - RNA, 19 nt, Artificial Sequence
  Description of Artificial Sequence: Synthetic oligonucleotide
gcacugcugggucugccuc

SEQ ID NO: 8992 - RNA, 19 nt, Artificial Sequence
  Description of Artificial Sequence: Synthetic oligonucleotide
cgcacugcugggucugccu

SEQ ID NO: 8993 - RNA, 19 nt, Artificial Sequence
  Description of Artificial Sequence: Synthetic oligonucleotide
ucgcacugcugggucugcc

SEQ ID NO: 8994 - RNA, 19 nt, Artificial Sequence
  Description of Artificial Sequence: Synthetic oligonucleotide
gucgcacugcugggucugc

SEQ ID NO: 8995 - RNA, 19 nt, Artificial Sequence
  Description of Artificial Sequence: Synthetic oligonucleotide
ggucgcacugcugggucug

SEQ ID NO: 8996 - RNA, 19 nt, Artificial Sequence
  Description of Artificial Sequence: Synthetic oligonucleotide
gggucgcacugcugggucu

SEQ ID NO: 8997 - RNA, 19 nt, Artificial Sequence
  Description of Artificial Sequence: Synthetic oligonucleotide
ugggucgcacugcuggguc

SEQ ID NO: 8998 - RNA, 19 nt, Artificial Sequence
  Description of Artificial Sequence: Synthetic oligonucleotide
gugggucgcacugcugggu

SEQ ID NO: 8999 - RNA, 19 nt, Artificial Sequence
  Description of Artificial Sequence: Synthetic oligonucleotide
ggugggucgcacugcuggg

SEQ ID NO: 9000 - RNA, 19 nt, Artificial Sequence
  Description of Artificial Sequence: Synthetic oligonucleotide
aggugggucgcacugcugg

SEQ ID NO: 9001 - RNA, 19 nt, Artificial Sequence
  Description of Artificial Sequence: Synthetic oligonucleotide
aaggugggucgcacugcug

SEQ ID NO: 9002 - RNA, 19 nt, Artificial Sequence
  Description of Artificial Sequence: Synthetic oligonucleotide
gaaggugggucgcacugcu

SEQ ID NO: 9003 - RNA, 19 nt, Artificial Sequence
  Description of Artificial Sequence: Synthetic oligonucleotide
ugaaggugggucgcacugc

SEQ ID NO: 9004 - RNA, 19 nt, Artificial Sequence
  Description of Artificial Sequence: Synthetic oligonucleotide
cugaaggugggucgcacug

SEQ ID NO: 9005 - RNA, 19 nt, Artificial Sequence
  Description of Artificial Sequence: Synthetic oligonucleotide
ucugaaggugggucgcacu

SEQ ID NO: 9006 - RNA, 19 nt, Artificial Sequence
  Description of Artificial Sequence: Synthetic oligonucleotide
cucugaaggugggucgcac

SEQ ID NO: 9007 - RNA, 19 nt, Artificial Sequence
  Description of Artificial Sequence: Synthetic oligonucleotide
acucugaaggugggucgca

SEQ ID NO: 9008 - RNA, 19 nt, Artificial Sequence
  Description of Artificial Sequence: Synthetic oligonucleotide
uacucugaaggugggucgc

SEQ ID NO: 9009 - RNA, 19 nt, Artificial Sequence
  Description of Artificial Sequence: Synthetic oligonucleotide
guacucugaaggugggucg

SEQ ID NO: 9010 - RNA, 19 nt, Artificial Sequence
  Description of Artificial Sequence: Synthetic oligonucleotide
aguacucugaagguggguc

SEQ ID NO: 9011 - RNA, 19 nt, Artificial Sequence
  Description of Artificial Sequence: Synthetic oligonucleotide
uaguacucugaaggugggu

SEQ ID NO: 9012 - RNA, 19 nt, Artificial Sequence
  Description of Artificial Sequence: Synthetic oligonucleotide
cuaguacucugaagguggg

SEQ ID NO: 9013 - RNA, 19 nt, Artificial Sequence
  Description of Artificial Sequence: Synthetic oligonucleotide
acuaguacucugaaggugg

SEQ ID NO: 9014 - RNA, 19 nt, Artificial Sequence
  Description of Artificial Sequence: Synthetic oligonucleotide
cacuaguacucugaaggug

SEQ ID NO: 9015 - RNA, 19 nt, Artificial Sequence
  Description of Artificial Sequence: Synthetic oligonucleotide
ccacuaguacucugaaggu

SEQ ID NO: 9016 - RNA, 19 nt, Artificial Sequence
  Description of Artificial Sequence: Synthetic oligonucleotide
cccacuaguacucugaagg

SEQ ID NO: 9017 - RNA, 19 nt, Artificial Sequence
  Description of Artificial Sequence: Synthetic oligonucleotide
ccccacuaguacucugaag

SEQ ID NO: 9018 - RNA, 19 nt, Artificial Sequence
  Description of Artificial Sequence: Synthetic oligonucleotide
cccccacuaguacucugaa

SEQ ID NO: 9019 - RNA, 19 nt, Artificial Sequence
  Description of Artificial Sequence: Synthetic oligonucleotide
ucccccacuaguacucuga

SEQ ID NO: 9020 - RNA, 19 nt, Artificial Sequence
  Description of Artificial Sequence: Synthetic oligonucleotide
cucccccacuaguacucug

SEQ ID NO: 9021 - RNA, 19 nt, Artificial Sequence
  Description of Artificial Sequence: Synthetic oligonucleotide
ccucccccacuaguacucu

SEQ ID NO: 9022 - RNA, 19 nt, Artificial Sequence
  Description of Artificial Sequence: Synthetic oligonucleotide
accucccccacuaguacuc

SEQ ID NO: 9023 - RNA, 19 nt, Artificial Sequence
  Description of Artificial Sequence: Synthetic oligonucleotide
caccucccccacuaguacu

SEQ ID NO: 9024 - RNA, 19 nt, Artificial Sequence
  Description of Artificial Sequence: Synthetic oligonucleotide
ccaccucccccacuaguac

SEQ ID NO: 9025 - RNA, 19 nt, Artificial Sequence
  Description of Artificial Sequence: Synthetic oligonucleotide
uccaccucccccacuagua

SEQ ID NO: 9026 - RNA, 19 nt, Artificial Sequence
  Description of Artificial Sequence: Synthetic oligonucleotide
cuccaccucccccacuagu

SEQ ID NO: 9027 - RNA, 19 nt, Artificial Sequence
  Description of Artificial Sequence: Synthetic oligonucleotide
gcuccaccucccccacuag

SEQ ID NO: 9028 - RNA, 19 nt, Artificial Sequence
  Description of Artificial Sequence: Synthetic oligonucleotide
ugcuccaccucccccacua

SEQ ID NO: 9029 - RNA, 19 nt, Artificial Sequence
  Description of Artificial Sequence: Synthetic oligonucleotide
cugcuccaccucccccacu

SEQ ID NO: 9030 - RNA, 19 nt, Artificial Sequence
  Description of Artificial Sequence: Synthetic oligonucleotide
ucugcuccaccucccccac

SEQ ID NO: 9031 - RNA, 19 nt, Artificial Sequence
  Description of Artificial Sequence: Synthetic oligonucleotide
aucugcuccaccuccccca

SEQ ID NO: 9032 - RNA, 19 nt, Artificial Sequence
  Description of Artificial Sequence: Synthetic oligonucleotide
uaucugcuccaccuccccc

SEQ ID NO: 9033 - RNA, 19 nt, Artificial Sequence
  Description of Artificial Sequence: Synthetic oligonucleotide
cuaucugcuccaccucccc

SEQ ID NO: 9034 - RNA, 19 nt, Artificial Sequence
  Description of Artificial Sequence: Synthetic oligonucleotide
acuaucugcuccaccuccc

SEQ ID NO: 9035 - RNA, 19 nt, Artificial Sequence
  Description of Artificial Sequence: Synthetic oligonucleotide
cacuaucugcuccaccucc

SEQ ID NO: 9036 - RNA, 19 nt, Artificial Sequence
  Description of Artificial Sequence: Synthetic oligonucleotide
acacuaucugcuccaccuc

SEQ ID NO: 9037 - RNA, 19 nt, Artificial Sequence
  Description of Artificial Sequence: Synthetic oligonucleotide
gacacuaucugcuccaccu

SEQ ID NO: 9038 - RNA, 19 nt, Artificial Sequence
  Description of Artificial Sequence: Synthetic oligonucleotide
agacacuaucugcuccacc

SEQ ID NO: 9039 - RNA, 19 nt, Artificial Sequence
  Description of Artificial Sequence: Synthetic oligonucleotide
cagacacuaucugcuccac

SEQ ID NO: 9040 - RNA, 19 nt, Artificial Sequence
  Description of Artificial Sequence: Synthetic oligonucleotide
gcagacacuaucugcucca

SEQ ID NO: 9041 - RNA, 19 nt, Artificial Sequence
  Description of Artificial Sequence: Synthetic oligonucleotide
ugcagacacuaucugcucc

SEQ ID NO: 9042 - RNA, 19 nt, Artificial Sequence
  Description of Artificial Sequence: Synthetic oligonucleotide
gugcagacacuaucugcuc

SEQ ID NO: 9043 - RNA, 19 nt, Artificial Sequence
  Description of Artificial Sequence: Synthetic oligonucleotide
agugcagacacuaucugcu

SEQ ID NO: 9044 - RNA, 19 nt, Artificial Sequence
  Description of Artificial Sequence: Synthetic oligonucleotide
cagugcagacacuaucugc

SEQ ID NO: 9045 - RNA, 19 nt, Artificial Sequence
  Description of Artificial Sequence: Synthetic oligonucleotide
gcagugcagacacuaucug

SEQ ID NO: 9046 - RNA, 19 nt, Artificial Sequence
  Description of Artificial Sequence: Synthetic oligonucleotide
agcagugcagacacuaucu

SEQ ID NO: 9047 - RNA, 19 nt, Artificial Sequence
  Description of Artificial Sequence: Synthetic oligonucleotide
aagcagugcagacacuauc

SEQ ID NO: 9048 - RNA, 19 nt, Artificial Sequence
  Description of Artificial Sequence: Synthetic oligonucleotide
caagcagugcagacacuau

SEQ ID NO: 9049 - RNA, 19 nt, Artificial Sequence
  Description of Artificial Sequence: Synthetic oligonucleotide
ccaagcagugcagacacua

SEQ ID NO: 9050 - RNA, 19 nt, Artificial Sequence
  Description of Artificial Sequence: Synthetic oligonucleotide
cccaagcagugcagacacu

SEQ ID NO: 9051 - RNA, 19 nt, Artificial Sequence
  Description of Artificial Sequence: Synthetic oligonucleotide
ccccaagcagugcagacac

SEQ ID NO: 9052 - RNA, 19 nt, Artificial Sequence
  Description of Artificial Sequence: Synthetic oligonucleotide
uccccaagcagugcagaca

SEQ ID NO: 9053 - RNA, 19 nt, Artificial Sequence
  Description of Artificial Sequence: Synthetic oligonucleotide
guccccaagcagugcagac

SEQ ID NO: 9054 - RNA, 19 nt, Artificial Sequence
  Description of Artificial Sequence: Synthetic oligonucleotide
gguccccaagcagugcaga

SEQ ID NO: 9055 - RNA, 19 nt, Artificial Sequence
  Description of Artificial Sequence: Synthetic oligonucleotide
ugguccccaagcagugcag

SEQ ID NO: 9056 - RNA, 19 nt, Artificial Sequence
  Description of Artificial Sequence: Synthetic oligonucleotide
augguccccaagcagugca

SEQ ID NO: 9057 - RNA, 19 nt, Artificial Sequence
  Description of Artificial Sequence: Synthetic oligonucleotide
aaugguccccaagcagugc

SEQ ID NO: 9058 - RNA, 19 nt, Artificial Sequence
  Description of Artificial Sequence: Synthetic oligonucleotide
uaaugguccccaagcagug

SEQ ID NO: 9059 - RNA, 19 nt, Artificial Sequence
  Description of Artificial Sequence: Synthetic oligonucleotide
auaaugguccccaagcagu

SEQ ID NO: 9060 - RNA, 19 nt, Artificial Sequence
  Description of Artificial Sequence: Synthetic oligonucleotide
cauaaugguccccaagcag

SEQ ID NO: 9061 - RNA, 19 nt, Artificial Sequence
  Description of Artificial Sequence: Synthetic oligonucleotide
acauaaugguccccaagca

SEQ ID NO: 9062 - RNA, 19 nt, Artificial Sequence
  Description of Artificial Sequence: Synthetic oligonucleotide
cacauaaugguccccaagc

SEQ ID NO: 9063 - RNA, 19 nt, Artificial Sequence
  Description of Artificial Sequence: Synthetic oligonucleotide
gcacauaaugguccccaag

SEQ ID NO: 9064 - RNA, 19 nt, Artificial Sequence
  Description of Artificial Sequence: Synthetic oligonucleotide
ugcacauaaugguccccaa

SEQ ID NO: 9065 - RNA, 19 nt, Artificial Sequence
  Description of Artificial Sequence: Synthetic oligonucleotide
cugcacauaauggucccca

SEQ ID NO: 9066 - RNA, 19 nt, Artificial Sequence
  Description of Artificial Sequence: Synthetic oligonucleotide
gcugcacauaauggucccc

SEQ ID NO: 9067 - RNA, 19 nt, Artificial Sequence
  Description of Artificial Sequence: Synthetic oligonucleotide
agcugcacauaaugguccc

SEQ ID NO: 9068 - RNA, 19 nt, Artificial Sequence
  Description of Artificial Sequence: Synthetic oligonucleotide
cagcugcacauaauggucc

SEQ ID NO: 9069 - RNA, 19 nt, Artificial Sequence
  Description of Artificial Sequence: Synthetic oligonucleotide
gcagcugcacauaaugguc

SEQ ID NO: 9070 - RNA, 19 nt, Artificial Sequence
  Description of Artificial Sequence: Synthetic oligonucleotide
ggcagcugcacauaauggu

SEQ ID NO: 9071 - RNA, 19 nt, Artificial Sequence
  Description of Artificial Sequence: Synthetic oligonucleotide
uggcagcugcacauaaugg

SEQ ID NO: 9072 - RNA, 19 nt, Artificial Sequence
  Description of Artificial Sequence: Synthetic oligonucleotide
cuggcagcugcacauaaug

SEQ ID NO: 9073 - RNA, 19 nt, Artificial Sequence
  Description of Artificial Sequence: Synthetic oligonucleotide
gcuggcagcugcacauaau

SEQ ID NO: 9074 - RNA, 19 nt, Artificial Sequence
  Description of Artificial Sequence: Synthetic oligonucleotide
ugcuggcagcugcacauaa

SEQ ID NO: 9075 - RNA, 19 nt, Artificial Sequence
  Description of Artificial Sequence: Synthetic oligonucleotide
uugcuggcagcugcacaua

SEQ ID NO: 9076 - RNA, 19 nt, Artificial Sequence
  Description of Artificial Sequence: Synthetic oligonucleotide
guugcuggcagcugcacau

SEQ ID NO: 9077 - RNA, 19 nt, Artificial Sequence
  Description of Artificial Sequence: Synthetic oligonucleotide
gguugcuggcagcugcaca

SEQ ID NO: 9078 - RNA, 19 nt, Artificial Sequence
  Description of Artificial Sequence: Synthetic oligonucleotide
agguugcuggcagcugcac

SEQ ID NO: 9079 - RNA, 19 nt, Artificial Sequence
  Description of Artificial Sequence: Synthetic oligonucleotide
uagguugcuggcagcugca

SEQ ID NO: 9080 - RNA, 19 nt, Artificial Sequence
  Description of Artificial Sequence: Synthetic oligonucleotide
guagguugcuggcagcugc

SEQ ID NO: 9081 - RNA, 19 nt, Artificial Sequence
  Description of Artificial Sequence: Synthetic oligonucleotide
uguagguugcuggcagcug

SEQ ID NO: 9082 - RNA, 19 nt, Artificial Sequence
  Description of Artificial Sequence: Synthetic oligonucleotide
auguagguugcuggcagcu

SEQ ID NO: 9083 - RNA, 19 nt, Artificial Sequence
  Description of Artificial Sequence: Synthetic oligonucleotide
cauguagguugcuggcagc

SEQ ID NO: 9084 - RNA, 19 nt, Artificial Sequence
  Description of Artificial Sequence: Synthetic oligonucleotide
ucauguagguugcuggcag

SEQ ID NO: 9085 - RNA, 19 nt, Artificial Sequence
  Description of Artificial Sequence: Synthetic oligonucleotide
uucauguagguugcuggca

SEQ ID NO: 9086 - RNA, 19 nt, Artificial Sequence
  Description of Artificial Sequence: Synthetic oligonucleotide
guucauguagguugcuggc

SEQ ID NO: 9087 - RNA, 19 nt, Artificial Sequence
  Description of Artificial Sequence: Synthetic oligonucleotide
aguucauguagguugcugg

SEQ ID NO: 9088 - RNA, 19 nt, Artificial Sequence
  Description of Artificial Sequence: Synthetic oligonucleotide
aaguucauguagguugcug

SEQ ID NO: 9089 - RNA, 19 nt, Artificial Sequence
  Description of Artificial Sequence: Synthetic oligonucleotide
caaguucauguagguugcu

SEQ ID NO: 9090 - RNA, 19 nt, Artificial Sequence
  Description of Artificial Sequence: Synthetic oligonucleotide
ccaaguucauguagguugc

SEQ ID NO: 9091 - RNA, 19 nt, Artificial Sequence
  Description of Artificial Sequence: Synthetic oligonucleotide
cccaaguucauguagguug

SEQ ID NO: 9092 - RNA, 19 nt, Artificial Sequence
  Description of Artificial Sequence: Synthetic oligonucleotide
gcccaaguucauguagguu

SEQ ID NO: 9093 - RNA, 19 nt, Artificial Sequence
  Description of Artificial Sequence: Synthetic oligonucleotide
ggcccaaguucauguaggu

SEQ ID NO: 9094 - RNA, 19 nt, Artificial Sequence
  Description of Artificial Sequence: Synthetic oligonucleotide
gggcccaaguucauguagg

SEQ ID NO: 9095 - RNA, 19 nt, Artificial Sequence
  Description of Artificial Sequence: Synthetic oligonucleotide
ggggcccaaguucauguag

SEQ ID NO: 9096 - RNA, 19 nt, Artificial Sequence
  Description of Artificial Sequence: Synthetic oligonucleotide
uggggcccaaguucaugua

SEQ ID NO: 9097 - RNA, 19 nt, Artificial Sequence
  Description of Artificial Sequence: Synthetic oligonucleotide
cuggggcccaaguucaugu

SEQ ID NO: 9098 - RNA, 19 nt, Artificial Sequence
  Description of Artificial Sequence: Synthetic oligonucleotide
gcuggggcccaaguucaug

SEQ ID NO: 9099 - RNA, 19 nt, Artificial Sequence
  Description of Artificial Sequence: Synthetic oligonucleotide
ugcuggggcccaaguucau

SEQ ID NO: 9100 - RNA, 19 nt, Artificial Sequence
  Description of Artificial Sequence: Synthetic oligonucleotide
gugcuggggcccaaguuca

SEQ ID NO: 9101 - RNA, 19 nt, Artificial Sequence
  Description of Artificial Sequence: Synthetic oligonucleotide
ggugcuggggcccaaguuc

SEQ ID NO: 9102 - RNA, 19 nt, Artificial Sequence
  Description of Artificial Sequence: Synthetic oligonucleotide
aggugcuggggcccaaguu

SEQ ID NO: 9103 - RNA, 19 nt, Artificial Sequence
  Description of Artificial Sequence: Synthetic oligonucleotide
gaggugcuggggcccaagu

SEQ ID NO: 9104 - RNA, 19 nt, Artificial Sequence
  Description of Artificial Sequence: Synthetic oligonucleotide
cgaggugcuggggcccaag

SEQ ID NO: 9105 - RNA, 19 nt, Artificial Sequence
  Description of Artificial Sequence: Synthetic oligonucleotide
gcgaggugcuggggcccaa

SEQ ID NO: 9106 - RNA, 19 nt, Artificial Sequence
  Description of Artificial Sequence: Synthetic oligonucleotide
ugcgaggugcuggggccca

SEQ ID NO: 9107 - RNA, 19 nt, Artificial Sequence
  Description of Artificial Sequence: Synthetic oligonucleotide
augcgaggugcuggggccc

SEQ ID NO: 9108 - RNA, 19 nt, Artificial Sequence
  Description of Artificial Sequence: Synthetic oligonucleotide
caugcgaggugcuggggcc

SEQ ID NO: 9109 - RNA, 19 nt, Artificial Sequence
  Description of Artificial Sequence: Synthetic oligonucleotide
ucaugcgaggugcuggggc

SEQ ID NO: 9110 - RNA, 19 nt, Artificial Sequence
  Description of Artificial Sequence: Synthetic oligonucleotide
cucaugcgaggugcugggg

SEQ ID NO: 9111 - RNA, 19 nt, Artificial Sequence
  Description of Artificial Sequence: Synthetic oligonucleotide
ucucaugcgaggugcuggg

SEQ ID NO: 9112 - RNA, 19 nt, Artificial Sequence
  Description of Artificial Sequence: Synthetic oligonucleotide
aucucaugcgaggugcugg

SEQ ID NO: 9113 - RNA, 19 nt, Artificial Sequence
  Description of Artificial Sequence: Synthetic oligonucleotide
caucucaugcgaggugcug

SEQ ID NO: 9114 - RNA, 19 nt, Artificial Sequence
  Description of Artificial Sequence: Synthetic oligonucleotide
ucaucucaugcgaggugcu

SEQ ID NO: 9115 - RNA, 19 nt, Artificial Sequence
  Description of Artificial Sequence: Synthetic oligonucleotide
uucaucucaugcgaggugc

SEQ ID NO: 9116 - RNA, 19 nt, Artificial Sequence
  Description of Artificial Sequence: Synthetic oligonucleotide
auucaucucaugcgaggug

SEQ ID NO: 9117 - RNA, 19 nt, Artificial Sequence
  Description of Artificial Sequence: Synthetic oligonucleotide
cauucaucucaugcgaggu

SEQ ID NO: 9118 - RNA, 19 nt, Artificial Sequence
  Description of Artificial Sequence: Synthetic oligonucleotide
acauucaucucaugcgagg

SEQ ID NO: 9119 - RNA, 19 nt, Artificial Sequence
  Description of Artificial Sequence: Synthetic oligonucleotide
cacauucaucucaugcgag

SEQ ID NO: 9120 - RNA, 19 nt, Artificial Sequence
  Description of Artificial Sequence: Synthetic oligonucleotide
gcacauucaucucaugcga

SEQ ID NO: 9121 - RNA, 19 nt, Artificial Sequence
  Description of Artificial Sequence: Synthetic oligonucleotide
cgcacauucaucucaugcg

SEQ ID NO: 9122 - RNA, 19 nt, Artificial Sequence
  Description of Artificial Sequence: Synthetic oligonucleotide
acgcacauucaucucaugc

SEQ ID NO: 9123 - RNA, 19 nt, Artificial Sequence
  Description of Artificial Sequence: Synthetic oligonucleotide
gacgcacauucaucucaug

SEQ ID NO: 9124 - RNA, 19 nt, Artificial Sequence
  Description of Artificial Sequence: Synthetic oligonucleotide
ggacgcacauucaucucau

SEQ ID NO: 9125 - RNA, 19 nt, Artificial Sequence
  Description of Artificial Sequence: Synthetic oligonucleotide
uggacgcacauucaucuca

SEQ ID NO: 9126 - RNA, 19 nt, Artificial Sequence
  Description of Artificial Sequence: Synthetic oligonucleotide
cuggacgcacauucaucuc

SEQ ID NO: 9127 - RNA, 19 nt, Artificial Sequence
  Description of Artificial Sequence: Synthetic oligonucleotide
ucuggacgcacauucaucu

SEQ ID NO: 9128 - RNA, 19 nt, Artificial Sequence
  Description of Artificial Sequence: Synthetic oligonucleotide
uucuggacgcacauucauc

SEQ ID NO: 9129 - RNA, 19 nt, Artificial Sequence
  Description of Artificial Sequence: Synthetic oligonucleotide
guucuggacgcacauucau

SEQ ID NO: 9130 - RNA, 19 nt, Artificial Sequence
  Description of Artificial Sequence: Synthetic oligonucleotide
uguucuggacgcacauuca

SEQ ID NO: 9131 - RNA, 19 nt, Artificial Sequence
  Description of Artificial Sequence: Synthetic oligonucleotide
cuguucuggacgcacauuc

SEQ ID NO: 9132 - RNA, 19 nt, Artificial Sequence
  Description of Artificial Sequence: Synthetic oligonucleotide
gcuguucuggacgcacauu

SEQ ID NO: 9133 - RNA, 19 nt, Artificial Sequence
  Description of Artificial Sequence: Synthetic oligonucleotide
ggcuguucuggacgcacau

SEQ ID NO: 9134 - RNA, 19 nt, Artificial Sequence
  Description of Artificial Sequence: Synthetic oligonucleotide
cggcuguucuggacgcaca

SEQ ID NO: 9135 - RNA, 19 nt, Artificial Sequence
  Description of Artificial Sequence: Synthetic oligonucleotide
gcggcuguucuggacgcac

SEQ ID NO: 9136 - RNA, 19 nt, Artificial Sequence
  Description of Artificial Sequence: Synthetic oligonucleotide
ugcggcuguucuggacgca

SEQ ID NO: 9137 - RNA, 19 nt, Artificial Sequence
  Description of Artificial Sequence: Synthetic oligonucleotide
cugcggcuguucuggacgc

SEQ ID NO: 9138 - RNA, 19 nt, Artificial Sequence
  Description of Artificial Sequence: Synthetic oligonucleotide
acugcggcuguucuggacg

SEQ ID NO: 9139 - RNA, 19 nt, Artificial Sequence
  Description of Artificial Sequence: Synthetic oligonucleotide
aacugcggcuguucuggac

SEQ ID NO: 9140 - RNA, 19 nt, Artificial Sequence
  Description of Artificial Sequence: Synthetic oligonucleotide
gaacugcggcuguucugga

SEQ ID NO: 9141 - RNA, 19 nt, Artificial Sequence
  Description of Artificial Sequence: Synthetic oligonucleotide
agaacugcggcuguucugg

SEQ ID NO: 9142 - RNA, 19 nt, Artificial Sequence
  Description of Artificial Sequence: Synthetic oligonucleotide
gagaacugcggcuguucug

SEQ ID NO: 9143 - RNA, 19 nt, Artificial Sequence
  Description of Artificial Sequence: Synthetic oligonucleotide
ugagaacugcggcuguucu

SEQ ID NO: 9144 - RNA, 19 nt, Artificial Sequence
  Description of Artificial Sequence: Synthetic oligonucleotide
gugagaacugcggcuguuc

SEQ ID NO: 9145 - RNA, 19 nt, Artificial Sequence
  Description of Artificial Sequence: Synthetic oligonucleotide
ggugagaacugcggcuguu

SEQ ID NO: 9146 - RNA, 19 nt, Artificial Sequence
  Description of Artificial Sequence: Synthetic oligonucleotide
gggugagaacugcggcugu

SEQ ID NO: 9147 - RNA, 19 nt, Artificial Sequence
  Description of Artificial Sequence: Synthetic oligonucleotide
ugggugagaacugcggcug

SEQ ID NO: 9148 - RNA, 19 nt, Artificial Sequence
  Description of Artificial Sequence: Synthetic oligonucleotide
augggugagaacugcggcu

SEQ ID NO: 9149 - RNA, 19 nt, Artificial Sequence
  Description of Artificial Sequence: Synthetic oligonucleotide
caugggugagaacugcggc

SEQ ID NO: 9150 - RNA, 19 nt, Artificial Sequence
  Description of Artificial Sequence: Synthetic oligonucleotide
gcaugggugagaacugcgg

SEQ ID NO: 9151 - RNA, 19 nt, Artificial Sequence
  Description of Artificial Sequence: Synthetic oligonucleotide
ggcaugggugagaacugcg

SEQ ID NO: 9152 - RNA, 19 nt, Artificial Sequence
  Description of Artificial Sequence: Synthetic oligonucleotide
uggcaugggugagaacugc

SEQ ID NO: 9153 - RNA, 19 nt, Artificial Sequence
  Description of Artificial Sequence: Synthetic oligonucleotide
cuggcaugggugagaacug

SEQ ID NO: 9154 - RNA, 19 nt, Artificial Sequence
  Description of Artificial Sequence: Synthetic oligonucleotide
ccuggcaugggugagaacu

SEQ ID NO: 9155 - RNA, 19 nt, Artificial Sequence
  Description of Artificial Sequence: Synthetic oligonucleotide
cccuggcaugggugagaac

SEQ ID NO: 9156 - RNA, 19 nt, Artificial Sequence
  Description of Artificial Sequence: Synthetic oligonucleotide
ucccuggcaugggugagaa

SEQ ID NO: 9157 - RNA, 19 nt, Artificial Sequence
  Description of Artificial Sequence: Synthetic oligonucleotide
uucccuggcaugggugaga

SEQ ID NO: 9158 - RNA, 19 nt, Artificial Sequence
  Description of Artificial Sequence: Synthetic oligonucleotide
auucccuggcaugggugag

SEQ ID NO: 9159 - RNA, 19 nt, Artificial Sequence
  Description of Artificial Sequence: Synthetic oligonucleotide
cauucccuggcauggguga

SEQ ID NO: 9160 - RNA, 19 nt, Artificial Sequence
  Description of Artificial Sequence: Synthetic oligonucleotide
acauucccuggcaugggug

SEQ ID NO: 9161 - RNA, 19 nt, Artificial Sequence
  Description of Artificial Sequence: Synthetic oligonucleotide
uacauucccuggcaugggu

SEQ ID NO: 9162 - RNA, 19 nt, Artificial Sequence
  Description of Artificial Sequence: Synthetic oligonucleotide
guacauucccuggcauggg

SEQ ID NO: 9163 - RNA, 19 nt, Artificial Sequence
  Description of Artificial Sequence: Synthetic oligonucleotide
cguacauucccuggcaugg

SEQ ID NO: 9164 - RNA, 19 nt, Artificial Sequence
  Description of Artificial Sequence: Synthetic oligonucleotide
gcguacauucccuggcaug

SEQ ID NO: 9165 - RNA, 19 nt, Artificial Sequence
  Description of Artificial Sequence: Synthetic oligonucleotide
ggcguacauucccuggcau

SEQ ID NO: 9166 - RNA, 19 nt, Artificial Sequence
  Description of Artificial Sequence: Synthetic oligonucleotide
cggcguacauucccuggca

SEQ ID NO: 9167 - RNA, 19 nt, Artificial Sequence
  Description of Artificial Sequence: Synthetic oligonucleotide
ccggcguacauucccuggc

SEQ ID NO: 9168 - RNA, 19 nt, Artificial Sequence
  Description of Artificial Sequence: Synthetic oligonucleotide
gccggcguacauucccugg

SEQ ID NO: 9169 - RNA, 19 nt, Artificial Sequence
  Description of Artificial Sequence: Synthetic oligonucleotide
ggccggcguacauucccug

SEQ ID NO: 9170 - RNA, 19 nt, Artificial Sequence
  Description of Artificial Sequence: Synthetic oligonucleotide
gggccggcguacauucccu

SEQ ID NO: 9171 - RNA, 19 nt, Artificial Sequence
  Description of Artificial Sequence: Synthetic oligonucleotide
ggggccggcguacauuccc

SEQ ID NO: 9172 - RNA, 19 nt, Artificial Sequence
  Description of Artificial Sequence: Synthetic oligonucleotide
cggggccggcguacauucc

SEQ ID NO: 9173 - RNA, 19 nt, Artificial Sequence
  Description of Artificial Sequence: Synthetic oligonucleotide
ccggggccggcguacauuc

SEQ ID NO: 9174 - RNA, 19 nt, Artificial Sequence
  Description of Artificial Sequence: Synthetic oligonucleotide
gccggggccggcguacauu

SEQ ID NO: 9175 - RNA, 19 nt, Artificial Sequence
  Description of Artificial Sequence: Synthetic oligonucleotide
ggccggggccggcguacau

SEQ ID NO: 9176 - RNA, 19 nt, Artificial Sequence
  Description of Artificial Sequence: Synthetic oligonucleotide
uggccggggccggcguaca

SEQ ID NO: 9177 - RNA, 19 nt, Artificial Sequence
  Description of Artificial Sequence: Synthetic oligonucleotide
guggccggggccggcguac

SEQ ID NO: 9178 - RNA, 19 nt, Artificial Sequence
  Description of Artificial Sequence: Synthetic oligonucleotide
aguggccggggccggcgua

SEQ ID NO: 9179 - RNA, 19 nt, Artificial Sequence
  Description of Artificial Sequence: Synthetic oligonucleotide
gaguggccggggccggcgu

SEQ ID NO: 9180 - RNA, 19 nt, Artificial Sequence
  Description of Artificial Sequence: Synthetic oligonucleotide
agaguggccggggccggcg

SEQ ID NO: 9181 - RNA, 19 nt, Artificial Sequence
  Description of Artificial Sequence: Synthetic oligonucleotide
gagaguggccggggccggc

SEQ ID NO: 9182 - RNA, 19 nt, Artificial Sequence
  Description of Artificial Sequence: Synthetic oligonucleotide
ugagaguggccggggccgg

SEQ ID NO: 9183 - RNA, 19 nt, Artificial Sequence
  Description of Artificial Sequence: Synthetic oligonucleotide
cugagaguggccggggccg

SEQ ID NO: 9184 - RNA, 19 nt, Artificial Sequence
  Description of Artificial Sequence: Synthetic oligonucleotide
ucugagaguggccggggcc

SEQ ID NO: 9185 - RNA, 19 nt, Artificial Sequence
  Description of Artificial Sequence: Synthetic oligonucleotide
cucugagaguggccggggc

SEQ ID NO: 9186 - RNA, 19 nt, Artificial Sequence
  Description of Artificial Sequence: Synthetic oligonucleotide
gcucugagaguggccgggg

SEQ ID NO: 9187 - RNA, 19 nt, Artificial Sequence
  Description of Artificial Sequence: Synthetic oligonucleotide
ggcucugagaguggccggg

SEQ ID NO: 9188 - RNA, 19 nt, Artificial Sequence
  Description of Artificial Sequence: Synthetic oligonucleotide
aggcucugagaguggccgg

SEQ ID NO: 9189 - RNA, 19 nt, Artificial Sequence
  Description of Artificial Sequence: Synthetic oligonucleotide
gaggcucugagaguggccg

SEQ ID NO: 9190 - RNA, 19 nt, Artificial Sequence
  Description of Artificial Sequence: Synthetic oligonucleotide
ggaggcucugagaguggcc

SEQ ID NO: 9191 - RNA, 19 nt, Artificial Sequence
  Description of Artificial Sequence: Synthetic oligonucleotide
aggaggcucugagaguggc

SEQ ID NO: 9192 - RNA, 19 nt, Artificial Sequence
  Description of Artificial Sequence: Synthetic oligonucleotide
gaggaggcucugagagugg

SEQ ID NO: 9193 - RNA, 19 nt, Artificial Sequence
  Description of Artificial Sequence: Synthetic oligonucleotide
cgaggaggcucugagagug

SEQ ID NO: 9194 - RNA, 19 nt, Artificial Sequence
  Description of Artificial Sequence: Synthetic oligonucleotide
ccgaggaggcucugagagu

SEQ ID NO: 9195 - RNA, 19 nt, Artificial Sequence
  Description of Artificial Sequence: Synthetic oligonucleotide
gccgaggaggcucugagag

SEQ ID NO: 9196 - RNA, 19 nt, Artificial Sequence
  Description of Artificial Sequence: Synthetic oligonucleotide
ggccgaggaggcucugaga

SEQ ID NO: 9197 - RNA, 19 nt, Artificial Sequence
  Description of Artificial Sequence: Synthetic oligonucleotide
gggccgaggaggcucugag

SEQ ID NO: 9198 - RNA, 19 nt, Artificial Sequence
  Description of Artificial Sequence: Synthetic oligonucleotide
ugggccgaggaggcucuga

SEQ ID NO: 9199 - RNA, 19 nt, Artificial Sequence
  Description of Artificial Sequence: Synthetic oligonucleotide
gugggccgaggaggcucug

SEQ ID NO: 9200 - RNA, 19 nt, Artificial Sequence
  Description of Artificial Sequence: Synthetic oligonucleotide
agugggccgaggaggcucu

SEQ ID NO: 9201 - RNA, 19 nt, Artificial Sequence
  Description of Artificial Sequence: Synthetic oligonucleotide
aagugggccgaggaggcuc

SEQ ID NO: 9202 - RNA, 19 nt, Artificial Sequence
  Description of Artificial Sequence: Synthetic oligonucleotide
caagugggccgaggaggcu

SEQ ID NO: 9203 - RNA, 19 nt, Artificial Sequence
  Description of Artificial Sequence: Synthetic oligonucleotide
ucaagugggccgaggaggc

SEQ ID NO: 9204 - RNA, 19 nt, Artificial Sequence
  Description of Artificial Sequence: Synthetic oligonucleotide
gucaagugggccgaggagg

SEQ ID NO: 9205 - RNA, 19 nt, Artificial Sequence
  Description of Artificial Sequence: Synthetic oligonucleotide
agucaagugggccgaggag

SEQ ID NO: 9206 - RNA, 19 nt, Artificial Sequence
  Description of Artificial Sequence: Synthetic oligonucleotide
aagucaagugggccgagga

SEQ ID NO: 9207 - RNA, 19 nt, Artificial Sequence
  Description of Artificial Sequence: Synthetic oligonucleotide
uaagucaagugggccgagg

SEQ ID NO: 9208 - RNA, 19 nt, Artificial Sequence
  Description of Artificial Sequence: Synthetic oligonucleotide
cuaagucaagugggccgag

SEQ ID NO: 9209 - RNA, 19 nt, Artificial Sequence
  Description of Artificial Sequence: Synthetic oligonucleotide
acuaagucaagugggccga

SEQ ID NO: 9210 - RNA, 19 nt, Artificial Sequence
  Description of Artificial Sequence: Synthetic oligonucleotide
aacuaagucaagugggccg

SEQ ID NO: 9211 - RNA, 19 nt, Artificial Sequence
  Description of Artificial Sequence: Synthetic oligonucleotide
gaacuaagucaagugggcc

SEQ ID NO: 9212 - RNA, 19 nt, Artificial Sequence
  Description of Artificial Sequence: Synthetic oligonucleotide
agaacuaagucaagugggc

SEQ ID NO: 9213 - RNA, 19 nt, Artificial Sequence
  Description of Artificial Sequence: Synthetic oligonucleotide
aagaacuaagucaaguggg

SEQ ID NO: 9214 - RNA, 19 nt, Artificial Sequence
  Description of Artificial Sequence: Synthetic oligonucleotide
caagaacuaagucaagugg

SEQ ID NO: 9215 - RNA, 19 nt, Artificial Sequence
  Description of Artificial Sequence: Synthetic oligonucleotide
ccaagaacuaagucaagug

SEQ ID NO: 9216 - RNA, 19 nt, Artificial Sequence
  Description of Artificial Sequence: Synthetic oligonucleotide
cccaagaacuaagucaagu

SEQ ID NO: 9217 - RNA, 19 nt, Artificial Sequence
  Description of Artificial Sequence: Synthetic oligonucleotide
gcccaagaacuaagucaag

SEQ ID NO: 9218 - RNA, 19 nt, Artificial Sequence
  Description of Artificial Sequence: Synthetic oligonucleotide
agcccaagaacuaagucaa

SEQ ID NO: 9219 - RNA, 19 nt, Artificial Sequence
  Description of Artificial Sequence: Synthetic oligonucleotide
cagcccaagaacuaaguca

SEQ ID NO: 9220 - RNA, 19 nt, Artificial Sequence
  Description of Artificial Sequence: Synthetic oligonucleotide
ccagcccaagaacuaaguc

SEQ ID NO: 9221 - RNA, 19 nt, Artificial Sequence
  Description of Artificial Sequence: Synthetic oligonucleotide
uccagcccaagaacuaagu

SEQ ID NO: 9222 - RNA, 19 nt, Artificial Sequence
  Description of Artificial Sequence: Synthetic oligonucleotide
guccagcccaagaacuaag

SEQ ID NO: 9223 - RNA, 19 nt, Artificial Sequence
  Description of Artificial Sequence: Synthetic oligonucleotide
gguccagcccaagaacuaa

SEQ ID NO: 9224 - RNA, 19 nt, Artificial Sequence
  Description of Artificial Sequence: Synthetic oligonucleotide
agguccagcccaagaacua

SEQ ID NO: 9225 - RNA, 19 nt, Artificial Sequence
  Description of Artificial Sequence: Synthetic oligonucleotide
cagguccagcccaagaacu

SEQ ID NO: 9226 - RNA, 19 nt, Artificial Sequence
  Description of Artificial Sequence: Synthetic oligonucleotide
gcagguccagcccaagaac

SEQ ID NO: 9227 - RNA, 19 nt, Artificial Sequence
  Description of Artificial Sequence: Synthetic oligonucleotide
agcagguccagcccaagaa

SEQ ID NO: 9228 - RNA, 19 nt, Artificial Sequence
  Description of Artificial Sequence: Synthetic oligonucleotide
aagcagguccagcccaaga

SEQ ID NO: 9229 - RNA, 19 nt, Artificial Sequence
  Description of Artificial Sequence: Synthetic oligonucleotide
uaagcagguccagcccaag

SEQ ID NO: 9230 - RNA, 19 nt, Artificial Sequence
  Description of Artificial Sequence: Synthetic oligonucleotide
cuaagcagguccagcccaa

SEQ ID NO: 9231 - RNA, 19 nt, Artificial Sequence
  Description of Artificial Sequence: Synthetic oligonucleotide
gcuaagcagguccagccca

SEQ ID NO: 9232 - RNA, 19 nt, Artificial Sequence
  Description of Artificial Sequence: Synthetic oligonucleotide
agcuaagcagguccagccc

SEQ ID NO: 9233 - RNA, 19 nt, Artificial Sequence
  Description of Artificial Sequence: Synthetic oligonucleotide
cagcuaagcagguccagcc

SEQ ID NO: 9234 - RNA, 19 nt, Artificial Sequence
  Description of Artificial Sequence: Synthetic oligonucleotide
gcagcuaagcagguccagc

SEQ ID NO: 9235 - RNA, 19 nt, Artificial Sequence
  Description of Artificial Sequence: Synthetic oligonucleotide
ggcagcuaagcagguccag

SEQ ID NO: 9236 - RNA, 19 nt, Artificial Sequence
  Description of Artificial Sequence: Synthetic oligonucleotide
aggcagcuaagcaggucca

SEQ ID NO: 9237 - RNA, 19 nt, Artificial Sequence
  Description of Artificial Sequence: Synthetic oligonucleotide
aaggcagcuaagcaggucc

SEQ ID NO: 9238 - RNA, 19 nt, Artificial Sequence
  Description of Artificial Sequence: Synthetic oligonucleotide
caaggcagcuaagcagguc

SEQ ID NO: 9239 - RNA, 19 nt, Artificial Sequence
  Description of Artificial Sequence: Synthetic oligonucleotide
ucaaggcagcuaagcaggu

SEQ ID NO: 9240 - RNA, 19 nt, Artificial Sequence
  Description of Artificial Sequence: Synthetic oligonucleotide
cucaaggcagcuaagcagg

SEQ ID NO: 9241 - RNA, 19 nt, Artificial Sequence
  Description of Artificial Sequence: Synthetic oligonucleotide
gcucaaggcagcuaagcag

SEQ ID NO: 9242 - RNA, 19 nt, Artificial Sequence
  Description of Artificial Sequence: Synthetic oligonucleotide
agcucaaggcagcuaagca

SEQ ID NO: 9243 - RNA, 19 nt, Artificial Sequence
  Description of Artificial Sequence: Synthetic oligonucleotide
uagcucaaggcagcuaagc

SEQ ID NO: 9244 - RNA, 19 nt, Artificial Sequence
  Description of Artificial Sequence: Synthetic oligonucleotide
uuagcucaaggcagcuaag

SEQ ID NO: 9245 - RNA, 19 nt, Artificial Sequence
  Description of Artificial Sequence: Synthetic oligonucleotide
guuagcucaaggcagcuaa

SEQ ID NO: 9246 - RNA, 19 nt, Artificial Sequence
  Description of Artificial Sequence: Synthetic oligonucleotide
gguuagcucaaggcagcua

SEQ ID NO: 9247 - RNA, 19 nt, Artificial Sequence
  Description of Artificial Sequence: Synthetic oligonucleotide
ggguuagcucaaggcagcu

SEQ ID NO: 9248 - RNA, 19 nt, Artificial Sequence
  Description of Artificial Sequence: Synthetic oligonucleotide
gggguuagcucaaggcagc

SEQ ID NO: 9249 - RNA, 19 nt, Artificial Sequence
  Description of Artificial Sequence: Synthetic oligonucleotide
ugggguuagcucaaggcag

SEQ ID NO: 9250 - RNA, 19 nt, Artificial Sequence
  Description of Artificial Sequence: Synthetic oligonucleotide
uugggguuagcucaaggca

SEQ ID NO: 9251 - RNA, 19 nt, Artificial Sequence
  Description of Artificial Sequence: Synthetic oligonucleotide
cuugggguuagcucaaggc

SEQ ID NO: 9252 - RNA, 19 nt, Artificial Sequence
  Description of Artificial Sequence: Synthetic oligonucleotide
gcuugggguuagcucaagg

SEQ ID NO: 9253 - RNA, 19 nt, Artificial Sequence
  Description of Artificial Sequence: Synthetic oligonucleotide
agcuugggguuagcucaag

SEQ ID NO: 9254 - RNA, 19 nt, Artificial Sequence
  Description of Artificial Sequence: Synthetic oligonucleotide
cagcuugggguuagcucaa

SEQ ID NO: 9255 - RNA, 19 nt, Artificial Sequence
  Description of Artificial Sequence: Synthetic oligonucleotide
gcagcuugggguuagcuca

SEQ ID NO: 9256 - RNA, 19 nt, Artificial Sequence
  Description of Artificial Sequence: Synthetic oligonucleotide
ggcagcuugggguuagcuc

SEQ ID NO: 9257 - RNA, 19 nt, Artificial Sequence
  Description of Artificial Sequence: Synthetic oligonucleotide
aggcagcuugggguuagcu

SEQ ID NO: 9258 - RNA, 19 nt, Artificial Sequence
  Description of Artificial Sequence: Synthetic oligonucleotide
gaggcagcuugggguuagc

SEQ ID NO: 9259 - RNA, 19 nt, Artificial Sequence
  Description of Artificial Sequence: Synthetic oligonucleotide
agaggcagcuugggguuag

SEQ ID NO: 9260 - RNA, 19 nt, Artificial Sequence
  Description of Artificial Sequence: Synthetic oligonucleotide
cagaggcagcuugggguua

SEQ ID NO: 9261 - RNA, 19 nt, Artificial Sequence
  Description of Artificial Sequence: Synthetic oligonucleotide
ccagaggcagcuugggguu

SEQ ID NO: 9262 - RNA, 19 nt, Artificial Sequence
  Description of Artificial Sequence: Synthetic oligonucleotide
cccagaggcagcuuggggu

SEQ ID NO: 9263 - RNA, 19 nt, Artificial Sequence
  Description of Artificial Sequence: Synthetic oligonucleotide
gcccagaggcagcuugggg

SEQ ID NO: 9264 - RNA, 19 nt, Artificial Sequence
  Description of Artificial Sequence: Synthetic oligonucleotide
ggcccagaggcagcuuggg

SEQ ID NO: 9265 - RNA, 19 nt, Artificial Sequence
  Description of Artificial Sequence: Synthetic oligonucleotide
uggcccagaggcagcuugg

SEQ ID NO: 9266 - RNA, 19 nt, Artificial Sequence
  Description of Artificial Sequence: Synthetic oligonucleotide
auggcccagaggcagcuug

SEQ ID NO: 9267 - RNA, 19 nt, Artificial Sequence
  Description of Artificial Sequence: Synthetic oligonucleotide
cauggcccagaggcagcuu

SEQ ID NO: 9268 - RNA, 19 nt, Artificial Sequence
  Description of Artificial Sequence: Synthetic oligonucleotide
gcauggcccagaggcagcu

SEQ ID NO: 9269 - RNA, 19 nt, Artificial Sequence
  Description of Artificial Sequence: Synthetic oligonucleotide
ggcauggcccagaggcagc

SEQ ID NO: 9270 - RNA, 19 nt, Artificial Sequence
  Description of Artificial Sequence: Synthetic oligonucleotide
uggcauggcccagaggcag

SEQ ID NO: 9271 - RNA, 19 nt, Artificial Sequence
  Description of Artificial Sequence: Synthetic oligonucleotide
cuggcauggcccagaggca

SEQ ID NO: 9272 - RNA, 19 nt, Artificial Sequence
  Description of Artificial Sequence: Synthetic oligonucleotide
ccuggcauggcccagaggc

SEQ ID NO: 9273 - RNA, 19 nt, Artificial Sequence
  Description of Artificial Sequence: Synthetic oligonucleotide
gccuggcauggcccagagg

SEQ ID NO: 9274 - RNA, 19 nt, Artificial Sequence
  Description of Artificial Sequence: Synthetic oligonucleotide
ggccuggcauggcccagag

SEQ ID NO: 9275 - RNA, 19 nt, Artificial Sequence
  Description of Artificial Sequence: Synthetic oligonucleotide
uggccuggcauggcccaga

SEQ ID NO: 9276 - RNA, 19 nt, Artificial Sequence
  Description of Artificial Sequence: Synthetic oligonucleotide
cuggccuggcauggcccag

SEQ ID NO: 9277 - RNA, 19 nt, Artificial Sequence
  Description of Artificial Sequence: Synthetic oligonucleotide
ucuggccuggcauggccca

SEQ ID NO: 9278 - RNA, 19 nt, Artificial Sequence
  Description of Artificial Sequence: Synthetic oligonucleotide
cucuggccuggcauggccc

SEQ ID NO: 9279 - RNA, 19 nt, Artificial Sequence
  Description of Artificial Sequence: Synthetic oligonucleotide
ccucuggccuggcauggcc

SEQ ID NO: 9280 - RNA, 19 nt, Artificial Sequence
  Description of Artificial Sequence: Synthetic oligonucleotide
cccucuggccuggcauggc

SEQ ID NO: 9281 - RNA, 19 nt, Artificial Sequence
  Description of Artificial Sequence: Synthetic oligonucleotide
gcccucuggccuggcaugg

SEQ ID NO: 9282 - RNA, 19 nt, Artificial Sequence
  Description of Artificial Sequence: Synthetic oligonucleotide
ugcccucuggccuggcaug

SEQ ID NO: 9283 - RNA, 19 nt, Artificial Sequence
  Description of Artificial Sequence: Synthetic oligonucleotide
cugcccucuggccuggcau

SEQ ID NO: 9284 - RNA, 19 nt, Artificial Sequence
  Description of Artificial Sequence: Synthetic oligonucleotide
acugcccucuggccuggca

SEQ ID NO: 9285 - RNA, 19 nt, Artificial Sequence
  Description of Artificial Sequence: Synthetic oligonucleotide
cacugcccucuggccuggc

SEQ ID NO: 9286 - RNA, 19 nt, Artificial Sequence
  Description of Artificial Sequence: Synthetic oligonucleotide
ccacugcccucuggccugg

SEQ ID NO: 9287 - RNA, 19 nt, Artificial Sequence
  Description of Artificial Sequence: Synthetic oligonucleotide
gccacugcccucuggccug

SEQ ID NO: 9288 - RNA, 19 nt, Artificial Sequence
  Description of Artificial Sequence: Synthetic oligonucleotide
ggccacugcccucuggccu

SEQ ID NO: 9289 - RNA, 19 nt, Artificial Sequence
  Description of Artificial Sequence: Synthetic oligonucleotide
gggccacugcccucuggcc

SEQ ID NO: 9290 - RNA, 19 nt, Artificial Sequence
  Description of Artificial Sequence: Synthetic oligonucleotide
agggccacugcccucuggc

SEQ ID NO: 9291 - RNA, 19 nt, Artificial Sequence
  Description of Artificial Sequence: Synthetic oligonucleotide
gagggccacugcccucugg

SEQ ID NO: 9292 - RNA, 19 nt, Artificial Sequence
  Description of Artificial Sequence: Synthetic oligonucleotide
ggagggccacugcccucug

SEQ ID NO: 9293 - RNA, 19 nt, Artificial Sequence
  Description of Artificial Sequence: Synthetic oligonucleotide
uggagggccacugcccucu

SEQ ID NO: 9294 - RNA, 19 nt, Artificial Sequence
  Description of Artificial Sequence: Synthetic oligonucleotide
guggagggccacugcccuc

SEQ ID NO: 9295 - RNA, 19 nt, Artificial Sequence
  Description of Artificial Sequence: Synthetic oligonucleotide
gguggagggccacugcccu

SEQ ID NO: 9296 - RNA, 19 nt, Artificial Sequence
  Description of Artificial Sequence: Synthetic oligonucleotide
agguggagggccacugccc

SEQ ID NO: 9297 - RNA, 19 nt, Artificial Sequence
  Description of Artificial Sequence: Synthetic oligonucleotide
aagguggagggccacugcc

SEQ ID NO: 9298 - RNA, 19 nt, Artificial Sequence
  Description of Artificial Sequence: Synthetic oligonucleotide
caagguggagggccacugc

SEQ ID NO: 9299 - RNA, 19 nt, Artificial Sequence
  Description of Artificial Sequence: Synthetic oligonucleotide
acaagguggagggccacug

SEQ ID NO: 9300 - RNA, 19 nt, Artificial Sequence
  Description of Artificial Sequence: Synthetic oligonucleotide
aacaagguggagggccacu

SEQ ID NO: 9301 - RNA, 19 nt, Artificial Sequence
  Description of Artificial Sequence: Synthetic oligonucleotide
gaacaagguggagggccac

SEQ ID NO: 9302 - RNA, 19 nt, Artificial Sequence
  Description of Artificial Sequence: Synthetic oligonucleotide
ggaacaagguggagggcca

SEQ ID NO: 9303 - RNA, 19 nt, Artificial Sequence
  Description of Artificial Sequence: Synthetic oligonucleotide
aggaacaagguggagggcc

SEQ ID NO: 9304 - RNA, 19 nt, Artificial Sequence
  Description of Artificial Sequence: Synthetic oligonucleotide
caggaacaagguggagggc

SEQ ID NO: 9305 - RNA, 19 nt, Artificial Sequence
  Description of Artificial Sequence: Synthetic oligonucleotide
gcaggaacaagguggaggg

SEQ ID NO: 9306 - RNA, 19 nt, Artificial Sequence
  Description of Artificial Sequence: Synthetic oligonucleotide
ggcaggaacaagguggagg

SEQ ID NO: 9307 - RNA, 19 nt, Artificial Sequence
  Description of Artificial Sequence: Synthetic oligonucleotide
gggcaggaacaagguggag

SEQ ID NO: 9308 - RNA, 19 nt, Artificial Sequence
  Description of Artificial Sequence: Synthetic oligonucleotide
agggcaggaacaaggugga

SEQ ID NO: 9309 - RNA, 19 nt, Artificial Sequence
  Description of Artificial Sequence: Synthetic oligonucleotide
aagggcaggaacaaggugg

SEQ ID NO: 9310 - RNA, 19 nt, Artificial Sequence
  Description of Artificial Sequence: Synthetic oligonucleotide
aaagggcaggaacaaggug

SEQ ID NO: 9311 - RNA, 19 nt, Artificial Sequence
  Description of Artificial Sequence: Synthetic oligonucleotide
uaaagggcaggaacaaggu

SEQ ID NO: 9312 - RNA, 19 nt, Artificial Sequence
  Description of Artificial Sequence: Synthetic oligonucleotide
uuaaagggcaggaacaagg

SEQ ID NO: 9313 - RNA, 19 nt, Artificial Sequence
  Description of Artificial Sequence: Synthetic oligonucleotide
guuaaagggcaggaacaag

SEQ ID NO: 9314 - RNA, 19 nt, Artificial Sequence
  Description of Artificial Sequence: Synthetic oligonucleotide
aguuaaagggcaggaacaa

SEQ ID NO: 9315 - RNA, 19 nt, Artificial Sequence
  Description of Artificial Sequence: Synthetic oligonucleotide
aaguuaaagggcaggaaca

SEQ ID NO: 9316 - RNA, 19 nt, Artificial Sequence
  Description of Artificial Sequence: Synthetic oligonucleotide
aaaguuaaagggcaggaac

SEQ ID NO: 9317 - RNA, 19 nt, Artificial Sequence
  Description of Artificial Sequence: Synthetic oligonucleotide
gaaaguuaaagggcaggaa

SEQ ID NO: 9318 - RNA, 19 nt, Artificial Sequence
  Description of Artificial Sequence: Synthetic oligonucleotide
ugaaaguuaaagggcagga

SEQ ID NO: 9319 - RNA, 19 nt, Artificial Sequence
  Description of Artificial Sequence: Synthetic oligonucleotide
cugaaaguuaaagggcagg

SEQ ID NO: 9320 - RNA, 19 nt, Artificial Sequence
  Description of Artificial Sequence: Synthetic oligonucleotide
ucugaaaguuaaagggcag

SEQ ID NO: 9321 - RNA, 19 nt, Artificial Sequence
  Description of Artificial Sequence: Synthetic oligonucleotide
cucugaaaguuaaagggca

SEQ ID NO: 9322 - RNA, 19 nt, Artificial Sequence
  Description of Artificial Sequence: Synthetic oligonucleotide
ccucugaaaguuaaagggc

SEQ ID NO: 9323 - RNA, 19 nt, Artificial Sequence
  Description of Artificial Sequence: Synthetic oligonucleotide
gccucugaaaguuaaaggg

SEQ ID NO: 9324 - RNA, 19 nt, Artificial Sequence
  Description of Artificial Sequence: Synthetic oligonucleotide
ugccucugaaaguuaaagg

SEQ ID NO: 9325 - RNA, 19 nt, Artificial Sequence
  Description of Artificial Sequence: Synthetic oligonucleotide
uugccucugaaaguuaaag

SEQ ID NO: 9326 - RNA, 19 nt, Artificial Sequence
  Description of Artificial Sequence: Synthetic oligonucleotide
auugccucugaaaguuaaa

SEQ ID NO: 9327 - RNA, 19 nt, Artificial Sequence
  Description of Artificial Sequence: Synthetic oligonucleotide
uauugccucugaaaguuaa

SEQ ID NO: 9328 - RNA, 19 nt, Artificial Sequence
  Description of Artificial Sequence: Synthetic oligonucleotide
cuauugccucugaaaguua

SEQ ID NO: 9329 - RNA, 19 nt, Artificial Sequence
  Description of Artificial Sequence: Synthetic oligonucleotide
ccuauugccucugaaaguu

SEQ ID NO: 9330 - RNA, 19 nt, Artificial Sequence
  Description of Artificial Sequence: Synthetic oligonucleotide
accuauugccucugaaagu

SEQ ID NO: 9331 - RNA, 19 nt, Artificial Sequence
  Description of Artificial Sequence: Synthetic oligonucleotide
uaccuauugccucugaaag

SEQ ID NO: 9332 - RNA, 19 nt, Artificial Sequence
  Description of Artificial Sequence: Synthetic oligonucleotide
uuaccuauugccucugaaa

SEQ ID NO: 9333 - RNA, 19 nt, Artificial Sequence
  Description of Artificial Sequence: Synthetic oligonucleotide
uuuaccuauugccucugaa

SEQ ID NO: 9334 - RNA, 19 nt, Artificial Sequence
  Description of Artificial Sequence: Synthetic oligonucleotide
auuuaccuauugccucuga

SEQ ID NO: 9335 - RNA, 19 nt, Artificial Sequence
  Description of Artificial Sequence: Synthetic oligonucleotide
cauuuaccuauugccucug

SEQ ID NO: 9336 - RNA, 19 nt, Artificial Sequence
  Description of Artificial Sequence: Synthetic oligonucleotide
ccauuuaccuauugccucu

SEQ ID NO: 9337 - RNA, 19 nt, Artificial Sequence
  Description of Artificial Sequence: Synthetic oligonucleotide
cccauuuaccuauugccuc

SEQ ID NO: 9338 - RNA, 19 nt, Artificial Sequence
  Description of Artificial Sequence: Synthetic oligonucleotide
ccccauuuaccuauugccu

SEQ ID NO: 9339 - RNA, 19 nt, Artificial Sequence
  Description of Artificial Sequence: Synthetic oligonucleotide
gccccauuuaccuauugcc

SEQ ID NO: 9340 - RNA, 19 nt, Artificial Sequence
  Description of Artificial Sequence: Synthetic oligonucleotide
ggccccauuuaccuauugc

SEQ ID NO: 9341 - RNA, 19 nt, Artificial Sequence
  Description of Artificial Sequence: Synthetic oligonucleotide
gggccccauuuaccuauug

SEQ ID NO: 9342 - RNA, 19 nt, Artificial Sequence
  Description of Artificial Sequence: Synthetic oligonucleotide
ugggccccauuuaccuauu

SEQ ID NO: 9343 - RNA, 19 nt, Artificial Sequence
  Description of Artificial Sequence: Synthetic oligonucleotide
augggccccauuuaccuau

SEQ ID NO: 9344 - RNA, 19 nt, Artificial Sequence
  Description of Artificial Sequence: Synthetic oligonucleotide
aaugggccccauuuaccua

SEQ ID NO: 9345 - RNA, 19 nt, Artificial Sequence
  Description of Artificial Sequence: Synthetic oligonucleotide
uaaugggccccauuuaccu

SEQ ID NO: 9346 - RNA, 19 nt, Artificial Sequence
  Description of Artificial Sequence: Synthetic oligonucleotide
cuaaugggccccauuuacc

SEQ ID NO: 9347 - RNA, 19 nt, Artificial Sequence
  Description of Artificial Sequence: Synthetic oligonucleotide
ccuaaugggccccauuuac

SEQ ID NO: 9348 - RNA, 19 nt, Artificial Sequence
  Description of Artificial Sequence: Synthetic oligonucleotide
accuaaugggccccauuua

SEQ ID NO: 9349 - RNA, 19 nt, Artificial Sequence
  Description of Artificial Sequence: Synthetic oligonucleotide
gaccuaaugggccccauuu

SEQ ID NO: 9350 - RNA, 19 nt, Artificial Sequence
  Description of Artificial Sequence: Synthetic oligonucleotide
ggaccuaaugggccccauu

SEQ ID NO: 9351 - RNA, 19 nt, Artificial Sequence
  Description of Artificial Sequence: Synthetic oligonucleotide
gggaccuaaugggccccau

SEQ ID NO: 9352 - RNA, 19 nt, Artificial Sequence
  Description of Artificial Sequence: Synthetic oligonucleotide
agggaccuaaugggcccca

SEQ ID NO: 9353 - RNA, 19 nt, Artificial Sequence
  Description of Artificial Sequence: Synthetic oligonucleotide
gagggaccuaaugggcccc

SEQ ID NO: 9354 - RNA, 19 nt, Artificial Sequence
  Description of Artificial Sequence: Synthetic oligonucleotide
ugagggaccuaaugggccc

SEQ ID NO: 9355 - RNA, 19 nt, Artificial Sequence
  Description of Artificial Sequence: Synthetic oligonucleotide
gugagggaccuaaugggcc

SEQ ID NO: 9356 - RNA, 19 nt, Artificial Sequence
  Description of Artificial Sequence: Synthetic oligonucleotide
agugagggaccuaaugggc

SEQ ID NO: 9357 - RNA, 19 nt, Artificial Sequence
  Description of Artificial Sequence: Synthetic oligonucleotide
gagugagggaccuaauggg

SEQ ID NO: 9358 - RNA, 19 nt, Artificial Sequence
  Description of Artificial Sequence: Synthetic oligonucleotide
ggagugagggaccuaaugg

SEQ ID NO: 9359 - RNA, 19 nt, Artificial Sequence
  Description of Artificial Sequence: Synthetic oligonucleotide
uggagugagggaccuaaug

SEQ ID NO: 9360 - RNA, 19 nt, Artificial Sequence
  Description of Artificial Sequence: Synthetic oligonucleotide
guggagugagggaccuaau

SEQ ID NO: 9361 - RNA, 19 nt, Artificial Sequence
  Description of Artificial Sequence: Synthetic oligonucleotide
uguggagugagggaccuaa

SEQ ID NO: 9362 - RNA, 19 nt, Artificial Sequence
  Description of Artificial Sequence: Synthetic oligonucleotide
cuguggagugagggaccua

SEQ ID NO: 9363 - RNA, 19 nt, Artificial Sequence
  Description of Artificial Sequence: Synthetic oligonucleotide
ucuguggagugagggaccu

SEQ ID NO: 9364 - RNA, 19 nt, Artificial Sequence
  Description of Artificial Sequence: Synthetic oligonucleotide
cucuguggagugagggacc

SEQ ID NO: 9365 - RNA, 19 nt, Artificial Sequence
  Description of Artificial Sequence: Synthetic oligonucleotide
acucuguggagugagggac

SEQ ID NO: 9366 - RNA, 19 nt, Artificial Sequence
  Description of Artificial Sequence: Synthetic oligonucleotide
cacucuguggagugaggga

SEQ ID NO: 9367 - RNA, 19 nt, Artificial Sequence
  Description of Artificial Sequence: Synthetic oligonucleotide
ucacucuguggagugaggg

SEQ ID NO: 9368 - RNA, 19 nt, Artificial Sequence
  Description of Artificial Sequence: Synthetic oligonucleotide
cucacucuguggagugagg

SEQ ID NO: 9369 - RNA, 19 nt, Artificial Sequence
  Description of Artificial Sequence: Synthetic oligonucleotide
gcucacucuguggagugag

SEQ ID NO: 9370 - RNA, 19 nt, Artificial Sequence
  Description of Artificial Sequence: Synthetic oligonucleotide
ggcucacucuguggaguga

SEQ ID NO: 9371 - RNA, 19 nt, Artificial Sequence
  Description of Artificial Sequence: Synthetic oligonucleotide
uggcucacucuguggagug

SEQ ID NO: 9372 - RNA, 19 nt, Artificial Sequence
  Description of Artificial Sequence: Synthetic oligonucleotide
cuggcucacucuguggagu

SEQ ID NO: 9373 - RNA, 19 nt, Artificial Sequence
  Description of Artificial Sequence: Synthetic oligonucleotide
acuggcucacucuguggag

SEQ ID NO: 9374 - RNA, 19 nt, Artificial Sequence
  Description of Artificial Sequence: Synthetic oligonucleotide
cacuggcucacucugugga

SEQ ID NO: 9375 - RNA, 19 nt, Artificial Sequence
  Description of Artificial Sequence: Synthetic oligonucleotide
ucacuggcucacucugugg

SEQ ID NO: 9376 - RNA, 19 nt, Artificial Sequence
  Description of Artificial Sequence: Synthetic oligonucleotide
cucacuggcucacucugug

SEQ ID NO: 9377 - RNA, 19 nt, Artificial Sequence
  Description of Artificial Sequence: Synthetic oligonucleotide
ccucacuggcucacucugu

SEQ ID NO: 9378 - RNA, 19 nt, Artificial Sequence
  Description of Artificial Sequence: Synthetic oligonucleotide
cccucacuggcucacucug

SEQ ID NO: 9379 - RNA, 19 nt, Artificial Sequence
  Description of Artificial Sequence: Synthetic oligonucleotide
gcccucacuggcucacucu

SEQ ID NO: 9380 - RNA, 19 nt, Artificial Sequence
  Description of Artificial Sequence: Synthetic oligonucleotide
ugcccucacuggcucacuc

SEQ ID NO: 9381 - RNA, 19 nt, Artificial Sequence
  Description of Artificial Sequence: Synthetic oligonucleotide
cugcccucacuggcucacu

SEQ ID NO: 9382 - RNA, 19 nt, Artificial Sequence
  Description of Artificial Sequence: Synthetic oligonucleotide
acugcccucacuggcucac

SEQ ID NO: 9383 - RNA, 19 nt, Artificial Sequence
  Description of Artificial Sequence: Synthetic oligonucleotide
gacugcccucacuggcuca

SEQ ID NO: 9384 - RNA, 19 nt, Artificial Sequence
  Description of Artificial Sequence: Synthetic oligonucleotide
ggacugcccucacuggcuc

SEQ ID NO: 9385 - RNA, 19 nt, Artificial Sequence
  Description of Artificial Sequence: Synthetic oligonucleotide
aggacugcccucacuggcu

SEQ ID NO: 9386 - RNA, 19 nt, Artificial Sequence
  Description of Artificial Sequence: Synthetic oligonucleotide
caggacugcccucacuggc

SEQ ID NO: 9387 - RNA, 19 nt, Artificial Sequence
  Description of Artificial Sequence: Synthetic oligonucleotide
gcaggacugcccucacugg

SEQ ID NO: 9388 - RNA, 19 nt, Artificial Sequence
  Description of Artificial Sequence: Synthetic oligonucleotide
ugcaggacugcccucacug

SEQ ID NO: 9389 - RNA, 19 nt, Artificial Sequence
  Description of Artificial Sequence: Synthetic oligonucleotide
uugcaggacugcccucacu

SEQ ID NO: 9390 - RNA, 19 nt, Artificial Sequence
  Description of Artificial Sequence: Synthetic oligonucleotide
guugcaggacugcccucac

SEQ ID NO: 9391 - RNA, 19 nt, Artificial Sequence
  Description of Artificial Sequence: Synthetic oligonucleotide
uguugcaggacugcccuca

SEQ ID NO: 9392 - RNA, 19 nt, Artificial Sequence
  Description of Artificial Sequence: Synthetic oligonucleotide
auguugcaggacugcccuc

SEQ ID NO: 9393 - RNA, 19 nt, Artificial Sequence
  Description of Artificial Sequence: Synthetic oligonucleotide
cauguugcaggacugcccu

SEQ ID NO: 9394 - RNA, 19 nt, Artificial Sequence
  Description of Artificial Sequence: Synthetic oligonucleotide
acauguugcaggacugccc

SEQ ID NO: 9395 - RNA, 19 nt, Artificial Sequence
  Description of Artificial Sequence: Synthetic oligonucleotide
uacauguugcaggacugcc

SEQ ID NO: 9396 - RNA, 19 nt, Artificial Sequence
  Description of Artificial Sequence: Synthetic oligonucleotide
auacauguugcaggacugc

SEQ ID NO: 9397 - RNA, 19 nt, Artificial Sequence
  Description of Artificial Sequence: Synthetic oligonucleotide
aauacauguugcaggacug

SEQ ID NO: 9398 - RNA, 19 nt, Artificial Sequence
  Description of Artificial Sequence: Synthetic oligonucleotide
aaauacauguugcaggacu

SEQ ID NO: 9399 - RNA, 19 nt, Artificial Sequence
  Description of Artificial Sequence: Synthetic oligonucleotide
uaaauacauguugcaggac

SEQ ID NO: 9400 - RNA, 19 nt, Artificial Sequence
  Description of Artificial Sequence: Synthetic oligonucleotide
auaaauacauguugcagga

SEQ ID NO: 9401 - RNA, 19 nt, Artificial Sequence
  Description of Artificial Sequence: Synthetic oligonucleotide
cauaaauacauguugcagg

SEQ ID NO: 9402 - RNA, 19 nt, Artificial Sequence
  Description of Artificial Sequence: Synthetic oligonucleotide
ccauaaauacauguugcag

SEQ ID NO: 9403 - RNA, 19 nt, Artificial Sequence
  Description of Artificial Sequence: Synthetic oligonucleotide
uccauaaauacauguugca

SEQ ID NO: 9404 - RNA, 19 nt, Artificial Sequence
  Description of Artificial Sequence: Synthetic oligonucleotide
cuccauaaauacauguugc

SEQ ID NO: 9405 - RNA, 19 nt, Artificial Sequence
  Description of Artificial Sequence: Synthetic oligonucleotide
acuccauaaauacauguug

SEQ ID NO: 9406 - RNA, 19 nt, Artificial Sequence
  Description of Artificial Sequence: Synthetic oligonucleotide
cacuccauaaauacauguu

SEQ ID NO: 9407 - RNA, 19 nt, Artificial Sequence
  Description of Artificial Sequence: Synthetic oligonucleotide
gcacuccauaaauacaugu

SEQ ID NO: 9408 - RNA, 19 nt, Artificial Sequence
  Description of Artificial Sequence: Synthetic oligonucleotide
ggcacuccauaaauacaug

SEQ ID NO: 9409 - RNA, 19 nt, Artificial Sequence
  Description of Artificial Sequence: Synthetic oligonucleotide
aggcacuccauaaauacau

SEQ ID NO: 9410 - RNA, 19 nt, Artificial Sequence
  Description of Artificial Sequence: Synthetic oligonucleotide
caggcacuccauaaauaca

SEQ ID NO: 9411 - RNA, 19 nt, Artificial Sequence
  Description of Artificial Sequence: Synthetic oligonucleotide
gcaggcacuccauaaauac

SEQ ID NO: 9412 - RNA, 19 nt, Artificial Sequence
  Description of Artificial Sequence: Synthetic oligonucleotide
agcaggcacuccauaaaua

SEQ ID NO: 9413 - RNA, 19 nt, Artificial Sequence
  Description of Artificial Sequence: Synthetic oligonucleotide
cagcaggcacuccauaaau

SEQ ID NO: 9414 - RNA, 19 nt, Artificial Sequence
  Description of Artificial Sequence: Synthetic oligonucleotide
acagcaggcacuccauaaa

SEQ ID NO: 9415 - RNA, 19 nt, Artificial Sequence
  Description of Artificial Sequence: Synthetic oligonucleotide
cacagcaggcacuccauaa

SEQ ID NO: 9416 - RNA, 19 nt, Artificial Sequence
  Description of Artificial Sequence: Synthetic oligonucleotide
ccacagcaggcacuccaua

SEQ ID NO: 9417 - RNA, 19 nt, Artificial Sequence
  Description of Artificial Sequence: Synthetic oligonucleotide
uccacagcaggcacuccau

SEQ ID NO: 9418 - RNA, 19 nt, Artificial Sequence
  Description of Artificial Sequence: Synthetic oligonucleotide
guccacagcaggcacucca

SEQ ID NO: 9419 - RNA, 19 nt, Artificial Sequence
  Description of Artificial Sequence: Synthetic oligonucleotide
gguccacagcaggcacucc

SEQ ID NO: 9420 - RNA, 19 nt, Artificial Sequence
  Description of Artificial Sequence: Synthetic oligonucleotide
ggguccacagcaggcacuc

SEQ ID NO: 9421 - RNA, 19 nt, Artificial Sequence
  Description of Artificial Sequence: Synthetic oligonucleotide
aggguccacagcaggcacu

SEQ ID NO: 9422 - RNA, 19 nt, Artificial Sequence
  Description of Artificial Sequence: Synthetic oligonucleotide
caggguccacagcaggcac

SEQ ID NO: 9423 - RNA, 19 nt, Artificial Sequence
  Description of Artificial Sequence: Synthetic oligonucleotide
acaggguccacagcaggca

SEQ ID NO: 9424 - RNA, 19 nt, Artificial Sequence
  Description of Artificial Sequence: Synthetic oligonucleotide
gacaggguccacagcaggc

SEQ ID NO: 9425 - RNA, 19 nt, Artificial Sequence
  Description of Artificial Sequence: Synthetic oligonucleotide
agacaggguccacagcagg

SEQ ID NO: 9426 - RNA, 19 nt, Artificial Sequence
  Description of Artificial Sequence: Synthetic oligonucleotide
aagacaggguccacagcag

SEQ ID NO: 9427 - RNA, 19 nt, Artificial Sequence
  Description of Artificial Sequence: Synthetic oligonucleotide
gaagacaggguccacagca

SEQ ID NO: 9428 - RNA, 19 nt, Artificial Sequence
  Description of Artificial Sequence: Synthetic oligonucleotide
agaagacaggguccacagc

SEQ ID NO: 9429 - RNA, 19 nt, Artificial Sequence
  Description of Artificial Sequence: Synthetic oligonucleotide
cagaagacaggguccacag

SEQ ID NO: 9430 - RNA, 19 nt, Artificial Sequence
  Description of Artificial Sequence: Synthetic oligonucleotide
ccagaagacaggguccaca

SEQ ID NO: 9431 - RNA, 19 nt, Artificial Sequence
  Description of Artificial Sequence: Synthetic oligonucleotide
cccagaagacaggguccac

SEQ ID NO: 9432 - RNA, 19 nt, Artificial Sequence
  Description of Artificial Sequence: Synthetic oligonucleotide
gcccagaagacagggucca

SEQ ID NO: 9433 - RNA, 19 nt, Artificial Sequence
  Description of Artificial Sequence: Synthetic oligonucleotide
ugcccagaagacagggucc

SEQ ID NO: 9434 - RNA, 19 nt, Artificial Sequence
  Description of Artificial Sequence: Synthetic oligonucleotide
gugcccagaagacaggguc

SEQ ID NO: 9435 - RNA, 19 nt, Artificial Sequence
  Description of Artificial Sequence: Synthetic oligonucleotide
ugugcccagaagacagggu

SEQ ID NO: 9436 - RNA, 19 nt, Artificial Sequence
  Description of Artificial Sequence: Synthetic oligonucleotide
cugugcccagaagacaggg

SEQ ID NO: 9437 - RNA, 19 nt, Artificial Sequence
  Description of Artificial Sequence: Synthetic oligonucleotide
acugugcccagaagacagg

SEQ ID NO: 9438 - RNA, 19 nt, Artificial Sequence
  Description of Artificial Sequence: Synthetic oligonucleotide
cacugugcccagaagacag

SEQ ID NO: 9439 - RNA, 19 nt, Artificial Sequence
  Description of Artificial Sequence: Synthetic oligonucleotide
ccacugugcccagaagaca

SEQ ID NO: 9440 - RNA, 19 nt, Artificial Sequence
  Description of Artificial Sequence: Synthetic oligonucleotide
uccacugugcccagaagac

SEQ ID NO: 9441 - RNA, 19 nt, Artificial Sequence
  Description of Artificial Sequence: Synthetic oligonucleotide
guccacugugcccagaaga

SEQ ID NO: 9442 - RNA, 19 nt, Artificial Sequence
  Description of Artificial Sequence: Synthetic oligonucleotide
aguccacugugcccagaag

SEQ ID NO: 9443 - RNA, 19 nt, Artificial Sequence
  Description of Artificial Sequence: Synthetic oligonucleotide
gaguccacugugcccagaa

SEQ ID NO: 9444 - RNA, 19 nt, Artificial Sequence
  Description of Artificial Sequence: Synthetic oligonucleotide
ugaguccacugugcccaga

SEQ ID NO: 9445 - RNA, 19 nt, Artificial Sequence
  Description of Artificial Sequence: Synthetic oligonucleotide
cugaguccacugugcccag

SEQ ID NO: 9446 - RNA, 19 nt, Artificial Sequence
  Description of Artificial Sequence: Synthetic oligonucleotide
gcugaguccacugugccca

SEQ ID NO: 9447 - RNA, 19 nt, Artificial Sequence
  Description of Artificial Sequence: Synthetic oligonucleotide
ugcugaguccacugugccc

SEQ ID NO: 9448 - RNA, 19 nt, Artificial Sequence
  Description of Artificial Sequence: Synthetic oligonucleotide
cugcugaguccacugugcc

SEQ ID NO: 9449 - RNA, 19 nt, Artificial Sequence
  Description of Artificial Sequence: Synthetic oligonucleotide
acugcugaguccacugugc

SEQ ID NO: 9450 - RNA, 19 nt, Artificial Sequence
  Description of Artificial Sequence: Synthetic oligonucleotide
cacugcugaguccacugug

SEQ ID NO: 9451 - RNA, 19 nt, Artificial Sequence
  Description of Artificial Sequence: Synthetic oligonucleotide
ucacugcugaguccacugu

SEQ ID NO: 9452 - RNA, 19 nt, Artificial Sequence
  Description of Artificial Sequence: Synthetic oligonucleotide
gucacugcugaguccacug

SEQ ID NO: 9453 - RNA, 19 nt, Artificial Sequence
  Description of Artificial Sequence: Synthetic oligonucleotide
ggucacugcugaguccacu

SEQ ID NO: 9454 - RNA, 19 nt, Artificial Sequence
  Description of Artificial Sequence: Synthetic oligonucleotide
uggucacugcugaguccac

SEQ ID NO: 9455 - RNA, 19 nt, Artificial Sequence
  Description of Artificial Sequence: Synthetic oligonucleotide
guggucacugcugagucca

SEQ ID NO: 9456 - RNA, 19 nt, Artificial Sequence
  Description of Artificial Sequence: Synthetic oligonucleotide
uguggucacugcugagucc

SEQ ID NO: 9457 - RNA, 19 nt, Artificial Sequence
  Description of Artificial Sequence: Synthetic oligonucleotide
guguggucacugcugaguc

SEQ ID NO: 9458 - RNA, 19 nt, Artificial Sequence
  Description of Artificial Sequence: Synthetic oligonucleotide
gguguggucacugcugagu

SEQ ID NO: 9459 - RNA, 19 nt, Artificial Sequence
  Description of Artificial Sequence: Synthetic oligonucleotide
ugguguggucacugcugag

SEQ ID NO: 9460 - RNA, 19 nt, Artificial Sequence
  Description of Artificial Sequence: Synthetic oligonucleotide
uugguguggucacugcuga

SEQ ID NO: 9461 - RNA, 19 nt, Artificial Sequence
  Description of Artificial Sequence: Synthetic oligonucleotide
guugguguggucacugcug

SEQ ID NO: 9462 - RNA, 19 nt, Artificial Sequence
  Description of Artificial Sequence: Synthetic oligonucleotide
uguugguguggucacugcu

SEQ ID NO: 9463 - RNA, 19 nt, Artificial Sequence
  Description of Artificial Sequence: Synthetic oligonucleotide
guguugguguggucacugc

SEQ ID NO: 9464 - RNA, 19 nt, Artificial Sequence
  Description of Artificial Sequence: Synthetic oligonucleotide
aguguugguguggucacug

SEQ ID NO: 9465 - RNA, 19 nt, Artificial Sequence
  Description of Artificial Sequence: Synthetic oligonucleotide
caguguugguguggucacu

SEQ ID NO: 9466 - RNA, 19 nt, Artificial Sequence
  Description of Artificial Sequence: Synthetic oligonucleotide
ucaguguugguguggucac

SEQ ID NO: 9467 - RNA, 19 nt, Artificial Sequence
  Description of Artificial Sequence: Synthetic oligonucleotide
gucaguguuggugugguca

SEQ ID NO: 9468 - RNA, 19 nt, Artificial Sequence
  Description of Artificial Sequence: Synthetic oligonucleotide
ggucaguguuggugugguc

SEQ ID NO: 9469 - RNA, 19 nt, Artificial Sequence
  Description of Artificial Sequence: Synthetic oligonucleotide
gggucaguguugguguggu

SEQ ID NO: 9470 - RNA, 19 nt, Artificial Sequence
  Description of Artificial Sequence: Synthetic oligonucleotide
agggucaguguuggugugg

SEQ ID NO: 9471 - RNA, 19 nt, Artificial Sequence
  Description of Artificial Sequence: Synthetic oligonucleotide
aagggucaguguuggugug

SEQ ID NO: 9472 - RNA, 19 nt, Artificial Sequence
  Description of Artificial Sequence: Synthetic oligonucleotide
caagggucaguguuggugu

SEQ ID NO: 9473 - RNA, 19 nt, Artificial Sequence
  Description of Artificial Sequence: Synthetic oligonucleotide
ucaagggucaguguuggug

SEQ ID NO: 9474 - RNA, 19 nt, Artificial Sequence
  Description of Artificial Sequence: Synthetic oligonucleotide
uucaagggucaguguuggu

SEQ ID NO: 9475 - RNA, 19 nt, Artificial Sequence
  Description of Artificial Sequence: Synthetic oligonucleotide
guucaagggucaguguugg

SEQ ID NO: 9476 - RNA, 19 nt, Artificial Sequence
  Description of Artificial Sequence: Synthetic oligonucleotide
gguucaagggucaguguug

SEQ ID NO: 9477 - RNA, 19 nt, Artificial Sequence
  Description of Artificial Sequence: Synthetic oligonucleotide
ugguucaagggucaguguu

SEQ ID NO: 9478 - RNA, 19 nt, Artificial Sequence
  Description of Artificial Sequence: Synthetic oligonucleotide
uugguucaagggucagugu

SEQ ID NO: 9479 - RNA, 19 nt, Artificial Sequence
  Description of Artificial Sequence: Synthetic oligonucleotide
auugguucaagggucagug

SEQ ID NO: 9480 - RNA, 19 nt, Artificial Sequence
  Description of Artificial Sequence: Synthetic oligonucleotide
uauugguucaagggucagu

SEQ ID NO: 9481 - RNA, 19 nt, Artificial Sequence
  Description of Artificial Sequence: Synthetic oligonucleotide
uuauugguucaagggucag

SEQ ID NO: 9482 - RNA, 19 nt, Artificial Sequence
  Description of Artificial Sequence: Synthetic oligonucleotide
uuuauugguucaaggguca

SEQ ID NO: 9483 - RNA, 19 nt, Artificial Sequence
  Description of Artificial Sequence: Synthetic oligonucleotide
cuuuauugguucaaggguc

SEQ ID NO: 9484 - RNA, 19 nt, Artificial Sequence
  Description of Artificial Sequence: Synthetic oligonucleotide
ccuuuauugguucaagggu

SEQ ID NO: 9485 - RNA, 19 nt, Artificial Sequence
  Description of Artificial Sequence: Synthetic oligonucleotide
uccuuuauugguucaaggg

SEQ ID NO: 9486 - RNA, 19 nt, Artificial Sequence
  Description of Artificial Sequence: Synthetic oligonucleotide
uuccuuuauugguucaagg

SEQ ID NO: 9487 - RNA, 19 nt, Artificial Sequence
  Description of Artificial Sequence: Synthetic oligonucleotide
guuccuuuauugguucaag

SEQ ID NO: 9488 - RNA, 19 nt, Artificial Sequence
  Description of Artificial Sequence: Synthetic oligonucleotide
uguuccuuuauugguucaa

SEQ ID NO: 9489 - RNA, 19 nt, Artificial Sequence
  Description of Artificial Sequence: Synthetic oligonucleotide
uuguuccuuuauugguuca

SEQ ID NO: 9490 - RNA, 19 nt, Artificial Sequence
  Description of Artificial Sequence: Synthetic oligonucleotide
uuuguuccuuuauugguuc

SEQ ID NO: 9491 - RNA, 19 nt, Artificial Sequence
  Description of Artificial Sequence: Synthetic oligonucleotide
auuuguuccuuuauugguu

SEQ ID NO: 9492 - RNA, 19 nt, Artificial Sequence
  Description of Artificial Sequence: Synthetic oligonucleotide
cauuuguuccuuuauuggu

SEQ ID NO: 9493 - RNA, 19 nt, Artificial Sequence
  Description of Artificial Sequence: Synthetic oligonucleotide
ucauuuguuccuuuauugg

SEQ ID NO: 9494 - RNA, 19 nt, Artificial Sequence
  Description of Artificial Sequence: Synthetic oligonucleotide
gucauuuguuccuuuauug

SEQ ID NO: 9495 - RNA, 19 nt, Artificial Sequence
  Description of Artificial Sequence: Synthetic oligonucleotide
agucauuuguuccuuuauu

SEQ ID NO: 9496 - RNA, 19 nt, Artificial Sequence
  Description of Artificial Sequence: Synthetic oligonucleotide
uagucauuuguuccuuuau

SEQ ID NO: 9497 - RNA, 19 nt, Artificial Sequence
  Description of Artificial Sequence: Synthetic oligonucleotide
auagucauuuguuccuuua

SEQ ID NO: 9498 - RNA, 19 nt, Artificial Sequence
  Description of Artificial Sequence: Synthetic oligonucleotide
aauagucauuuguuccuuu

SEQ ID NO: 9499 - RNA, 19 nt, Artificial Sequence
  Description of Artificial Sequence: Synthetic oligonucleotide
uaauagucauuuguuccuu

SEQ ID NO: 9500 - RNA, 19 nt, Artificial Sequence
  Description of Artificial Sequence: Synthetic oligonucleotide
uuaauagucauuuguuccu

SEQ ID NO: 9501 - RNA, 19 nt, Artificial Sequence
  Description of Artificial Sequence: Synthetic oligonucleotide
uuuaauagucauuuguucc

SEQ ID NO: 9502 - RNA, 19 nt, Artificial Sequence
  Description of Artificial Sequence: Synthetic oligonucleotide
cuuuaauagucauuuguuc

SEQ ID NO: 9503 - RNA, 19 nt, Artificial Sequence
  Description of Artificial Sequence: Synthetic oligonucleotide
gcuuuaauagucauuuguu

SEQ ID NO: 9504 - RNA, 19 nt, Artificial Sequence
  Description of Artificial Sequence: Synthetic oligonucleotide
ugcuuuaauagucauuugu

SEQ ID NO: 9505 - RNA, 19 nt, Artificial Sequence
  Description of Artificial Sequence: Synthetic oligonucleotide
gugcuuuaauagucauuug

SEQ ID NO: 9506 - RNA, 19 nt, Artificial Sequence
  Description of Artificial Sequence: Synthetic oligonucleotide
ugugcuuuaauagucauuu

SEQ ID NO: 9507 - RNA, 19 nt, Artificial Sequence
  Description of Artificial Sequence: Synthetic oligonucleotide
uugugcuuuaauagucauu

SEQ ID NO: 9508 - RNA, 19 nt, Artificial Sequence
  Description of Artificial Sequence: Synthetic oligonucleotide
uuugugcuuuaauagucau

SEQ ID NO: 9509 - RNA, 21 nt, Artificial Sequence
  Description of Artificial Sequence: Synthetic oligonucleotide
gcuguguuuguagccauaauu

SEQ ID NO: 9510 - RNA, 21 nt, Artificial Sequence
  Description of Artificial Sequence: Synthetic oligonucleotide
uguguuuguagccauacgauu

SEQ ID NO: 9511 - RNA, 21 nt, Artificial Sequence
  Description of Artificial Sequence: Synthetic oligonucleotide
uuuguagccauacgcaauauu

SEQ ID NO: 9512 - RNA, 21 nt, Artificial Sequence
  Description of Artificial Sequence: Synthetic oligonucleotide
uuguagccauacgcaaucauu

SEQ ID NO: 9513 - RNA, 21 nt, Artificial Sequence
  Description of Artificial Sequence: Synthetic oligonucleotide
uguagccauacgcaaucgauu

SEQ ID NO: 9514 - RNA, 21 nt, Artificial Sequence
  Description of Artificial Sequence: Synthetic oligonucleotide
cauacgcaaucgccugcaauu

SEQ ID NO: 9515 - RNA, 21 nt, Artificial Sequence
  Description of Artificial Sequence: Synthetic oligonucleotide
gcuuccugcaugaccuagauu

SEQ ID NO: 9516 - RNA, 21 nt, Artificial Sequence
  Description of Artificial Sequence: Synthetic oligonucleotide
cuuccugcaugaccuagaauu

SEQ ID NO: 9517 - RNA, 21 nt, Artificial Sequence
  Description of Artificial Sequence: Synthetic oligonucleotide
cuucucagcccaccauaaauu

SEQ ID NO: 9518 - RNA, 21 nt, Artificial Sequence
  Description of Artificial Sequence: Synthetic oligonucleotide
ccuccuauuucuacguggauu

SEQ ID NO: 9519 - RNA, 21 nt, Artificial Sequence
  Description of Artificial Sequence: Synthetic oligonucleotide
ccacgcucagugucuaucauu

SEQ ID NO: 9520 - RNA, 21 nt, Artificial Sequence
  Description of Artificial Sequence: Synthetic oligonucleotide
cagugucuaucaggcgucauu

SEQ ID NO: 9521 - RNA, 21 nt, Artificial Sequence
  Description of Artificial Sequence: Synthetic oligonucleotide
gugucuaucaggcgucucauu

SEQ ID NO: 9522 - RNA, 21 nt, Artificial Sequence
  Description of Artificial Sequence: Synthetic oligonucleotide
ugucuaucaggcgucucaauu

SEQ ID NO: 9523 - RNA, 21 nt, Artificial Sequence
  Description of Artificial Sequence: Synthetic oligonucleotide
gucuaucaggcgucucaaauu

SEQ ID NO: 9524 - RNA, 21 nt, Artificial Sequence
  Description of Artificial Sequence: Synthetic oligonucleotide
uaucaggcgucucaaggcauu

SEQ ID NO: 9525 - RNA, 21 nt, Artificial Sequence
  Description of Artificial Sequence: Synthetic oligonucleotide
ugcccaagcaucuugucuauu

SEQ ID NO: 9526 - RNA, 21 nt, Artificial Sequence
  Description of Artificial Sequence: Synthetic oligonucleotide
caucuugucuccuacaguauu

SEQ ID NO: 9527 - RNA, 21 nt, Artificial Sequence
  Description of Artificial Sequence: Synthetic oligonucleotide
uugucuccuacaguauugauu

SEQ ID NO: 9528 - RNA, 21 nt, Artificial Sequence
  Description of Artificial Sequence: Synthetic oligonucleotide
ugucuccuacaguauugaauu

SEQ ID NO: 9529 - RNA, 21 nt, Artificial Sequence
  Description of Artificial Sequence: Synthetic oligonucleotide
ucuccuacaguauugaauauu

SEQ ID NO: 9530 - RNA, 21 nt, Artificial Sequence
  Description of Artificial Sequence: Synthetic oligonucleotide
guauugaauacgugcacaauu

SEQ ID NO: 9531 - RNA, 21 nt, Artificial Sequence
  Description of Artificial Sequence: Synthetic oligonucleotide
auugaauacgugcacagcauu

SEQ ID NO: 9532 - RNA, 21 nt, Artificial Sequence
  Description of Artificial Sequence: Synthetic oligonucleotide
uugaauacgugcacagcuauu

SEQ ID NO: 9533 - RNA, 21 nt, Artificial Sequence
  Description of Artificial Sequence: Synthetic oligonucleotide
gaauacgugcacagcuucauu

SEQ ID NO: 9534 - RNA, 21 nt, Artificial Sequence
  Description of Artificial Sequence: Synthetic oligonucleotide
acuuccugacuguacagcauu

SEQ ID NO: 9535 - RNA, 21 nt, Artificial Sequence
  Description of Artificial Sequence: Synthetic oligonucleotide
agccagaguugggugacuauu

SEQ ID NO: 9536 - RNA, 21 nt, Artificial Sequence
  Description of Artificial Sequence: Synthetic oligonucleotide
gguccucgacugcagauuauu

SEQ ID NO: 9537 - RNA, 21 nt, Artificial Sequence
  Description of Artificial Sequence: Synthetic oligonucleotide
guccucgacugcagauuuauu

SEQ ID NO: 9538 - RNA, 21 nt, Artificial Sequence
  Description of Artificial Sequence: Synthetic oligonucleotide
uccucgacugcagauuugauu

SEQ ID NO: 9539 - RNA, 21 nt, Artificial Sequence
  Description of Artificial Sequence: Synthetic oligonucleotide
ccucgacugcagauuugcauu

SEQ ID NO: 9540 - RNA, 21 nt, Artificial Sequence
  Description of Artificial Sequence: Synthetic oligonucleotide
cgacugcagauuugcuccauu

SEQ ID NO: 9541 - RNA, 21 nt, Artificial Sequence
  Description of Artificial Sequence: Synthetic oligonucleotide
cugcagauuugcuccaaaauu

SEQ ID NO: 9542 - RNA, 21 nt, Artificial Sequence
  Description of Artificial Sequence: Synthetic oligonucleotide
ugcagauuugcuccaaaaauu

SEQ ID NO: 9543 - RNA, 21 nt, Artificial Sequence
  Description of Artificial Sequence: Synthetic oligonucleotide
cagauuugcuccaaaacgauu

SEQ ID NO: 9544 - RNA, 21 nt, Artificial Sequence
  Description of Artificial Sequence: Synthetic oligonucleotide
guggagcgcuguugugaaauu

SEQ ID NO: 9545 - RNA, 21 nt, Artificial Sequence
  Description of Artificial Sequence: Synthetic oligonucleotide
uggagcgcuguugugaauauu

SEQ ID NO: 9546 - RNA, 21 nt, Artificial Sequence
  Description of Artificial Sequence: Synthetic oligonucleotide
caaggacagcucaaaacuauu

SEQ ID NO: 9547 - RNA, 21 nt, Artificial Sequence
  Description of Artificial Sequence: Synthetic oligonucleotide
ugccccggaaagacuuugauu

SEQ ID NO: 9548 - RNA, 21 nt, Artificial Sequence
  Description of Artificial Sequence: Synthetic oligonucleotide
gccccggaaagacuuuguauu

SEQ ID NO: 9549 - RNA, 21 nt, Artificial Sequence
  Description of Artificial Sequence: Synthetic oligonucleotide
ccccggaaagacuuuguaauu

SEQ ID NO: 9550 - RNA, 21 nt, Artificial Sequence
  Description of Artificial Sequence: Synthetic oligonucleotide
cccggaaagacuuuguagauu

SEQ ID NO: 9551 - RNA, 21 nt, Artificial Sequence
  Description of Artificial Sequence: Synthetic oligonucleotide
uuguagaggaguuugaguauu

SEQ ID NO: 9552 - RNA, 21 nt, Artificial Sequence
  Description of Artificial Sequence: Synthetic oligonucleotide
agccucaccgugacuaacauu

SEQ ID NO: 9553 - RNA, 21 nt, Artificial Sequence
  Description of Artificial Sequence: Synthetic oligonucleotide
cucaccgugacuaacaugauu

SEQ ID NO: 9554 - RNA, 21 nt, Artificial Sequence
  Description of Artificial Sequence: Synthetic oligonucleotide
ucaccgugacuaacaugcauu

SEQ ID NO: 9555 - RNA, 21 nt, Artificial Sequence
  Description of Artificial Sequence: Synthetic oligonucleotide
caccgugacuaacaugccauu

SEQ ID NO: 9556 - RNA, 21 nt, Artificial Sequence
  Description of Artificial Sequence: Synthetic oligonucleotide
ugcugauagcagugcaacauu

SEQ ID NO: 9557 - RNA, 21 nt, Artificial Sequence
  Description of Artificial Sequence: Synthetic oligonucleotide
gucucacucuugaaggccauu

SEQ ID NO: 9558 - RNA, 21 nt, Artificial Sequence
  Description of Artificial Sequence: Synthetic oligonucleotide
ucacucuugaaggccagaauu

SEQ ID NO: 9559 - RNA, 21 nt, Artificial Sequence
  Description of Artificial Sequence: Synthetic oligonucleotide
ugugcuggucaaugggacauu

SEQ ID NO: 9560 - RNA, 21 nt, Artificial Sequence
  Description of Artificial Sequence: Synthetic oligonucleotide
ggucaaugggacugagugauu

SEQ ID NO: 9561 - RNA, 21 nt, Artificial Sequence
  Description of Artificial Sequence: Synthetic oligonucleotide
ucaaugggacugagugucauu

SEQ ID NO: 9562 - RNA, 21 nt, Artificial Sequence
  Description of Artificial Sequence: Synthetic oligonucleotide
caaugggacugagugucuauu

SEQ ID NO: 9563 - RNA, 21 nt, Artificial Sequence
  Description of Artificial Sequence: Synthetic oligonucleotide
gacugagugucugcuagcauu

SEQ ID NO: 9564 - RNA, 21 nt, Artificial Sequence
  Description of Artificial Sequence: Synthetic oligonucleotide
gaggggcagcuuuuauguauu

SEQ ID NO: 9565 - RNA, 21 nt, Artificial Sequence
  Description of Artificial Sequence: Synthetic oligonucleotide
gcagcuuuuaugugccacauu

SEQ ID NO: 9566 - RNA, 21 nt, Artificial Sequence
  Description of Artificial Sequence: Synthetic oligonucleotide
agcuuuuaugugccacacauu

SEQ ID NO: 9567 - RNA, 21 nt, Artificial Sequence
  Description of Artificial Sequence: Synthetic oligonucleotide
gaagacccugucgugcuaauu

SEQ ID NO: 9568 - RNA, 21 nt, Artificial Sequence
  Description of Artificial Sequence: Synthetic oligonucleotide
aagacccugucgugcuaaauu

SEQ ID NO: 9569 - RNA, 21 nt, Artificial Sequence
  Description of Artificial Sequence: Synthetic oligonucleotide
cuaagcaucagccccaacauu

SEQ ID NO: 9570 - RNA, 21 nt, Artificial Sequence
  Description of Artificial Sequence: Synthetic oligonucleotide
uaagcaucagccccaacuauu

SEQ ID NO: 9571 - RNA, 21 nt, Artificial Sequence
  Description of Artificial Sequence: Synthetic oligonucleotide
cuguggccagcaucuaacauu

SEQ ID NO: 9572 - RNA, 21 nt, Artificial Sequence
  Description of Artificial Sequence: Synthetic oligonucleotide
acuucagcauggcacuuaauu

SEQ ID NO: 9573 - RNA, 21 nt, Artificial Sequence
  Description of Artificial Sequence: Synthetic oligonucleotide
uucagcauggcacuuaguauu

SEQ ID NO: 9574 - RNA, 21 nt, Artificial Sequence
  Description of Artificial Sequence: Synthetic oligonucleotide
cagcauggcacuuagugcauu

SEQ ID NO: 9575 - RNA, 21 nt, Artificial Sequence
  Description of Artificial Sequence: Synthetic oligonucleotide
cacuuagugcugucauucauu

SEQ ID NO: 9576 - RNA, 21 nt, Artificial Sequence
  Description of Artificial Sequence: Synthetic oligonucleotide
ugcugucauuccaugacgauu

SEQ ID NO: 9577 - RNA, 21 nt, Artificial Sequence
  Description of Artificial Sequence: Synthetic oligonucleotide
ugucauuccaugacgggcauu

SEQ ID NO: 9578 - RNA, 21 nt, Artificial Sequence
  Description of Artificial Sequence: Synthetic oligonucleotide
cauuccaugacgggcuuaauu

SEQ ID NO: 9579 - RNA, 21 nt, Artificial Sequence
  Description of Artificial Sequence: Synthetic oligonucleotide
auuccaugacgggcuuagauu

SEQ ID NO: 9580 - RNA, 21 nt, Artificial Sequence
  Description of Artificial Sequence: Synthetic oligonucleotide
ugaggagcaugccauuaaauu

SEQ ID NO: 9581 - RNA, 21 nt, Artificial Sequence
  Description of Artificial Sequence: Synthetic oligonucleotide
gcaugccauuaaguuugaauu

SEQ ID NO: 9582 - RNA, 21 nt, Artificial Sequence
  Description of Artificial Sequence: Synthetic oligonucleotide
uauccuggguagagugguauu

SEQ ID NO: 9583 - RNA, 21 nt, Artificial Sequence
  Description of Artificial Sequence: Synthetic oligonucleotide
uggucuucagcuacugguauu

SEQ ID NO: 9584 - RNA, 21 nt, Artificial Sequence
  Description of Artificial Sequence: Synthetic oligonucleotide
cuaguucuuccucccaacauu

SEQ ID NO: 9585 - RNA, 21 nt, Artificial Sequence
  Description of Artificial Sequence: Synthetic oligonucleotide
uacucgggcucugacuacauu

SEQ ID NO: 9586 - RNA, 21 nt, Artificial Sequence
  Description of Artificial Sequence: Synthetic oligonucleotide
cacuuuggaguugucuacauu

SEQ ID NO: 9587 - RNA, 21 nt, Artificial Sequence
  Description of Artificial Sequence: Synthetic oligonucleotide
gagaauacauagaccaggauu

SEQ ID NO: 9588 - RNA, 21 nt, Artificial Sequence
  Description of Artificial Sequence: Synthetic oligonucleotide
auagaccaggcccagaauauu

SEQ ID NO: 9589 - RNA, 21 nt, Artificial Sequence
  Description of Artificial Sequence: Synthetic oligonucleotide
ggcccagaaucgaauccaauu

SEQ ID NO: 9590 - RNA, 21 nt, Artificial Sequence
  Description of Artificial Sequence: Synthetic oligonucleotide
cccagaaucgaauccaauauu

SEQ ID NO: 9591 - RNA, 21 nt, Artificial Sequence
  Description of Artificial Sequence: Synthetic oligonucleotide
cagaaucgaauccaauguauu

SEQ ID NO: 9592 - RNA, 21 nt, Artificial Sequence
  Description of Artificial Sequence: Synthetic oligonucleotide
agaaucgaauccaaugugauu

SEQ ID NO: 9593 - RNA, 21 nt, Artificial Sequence
  Description of Artificial Sequence: Synthetic oligonucleotide
gaaucgaauccaaugugcauu

SEQ ID NO: 9594 - RNA, 21 nt, Artificial Sequence
  Description of Artificial Sequence: Synthetic oligonucleotide
cgaauccaaugugccaucauu

SEQ ID NO: 9595 - RNA, 21 nt, Artificial Sequence
  Description of Artificial Sequence: Synthetic oligonucleotide
gaauccaaugugccaucaauu

SEQ ID NO: 9596 - RNA, 21 nt, Artificial Sequence
  Description of Artificial Sequence: Synthetic oligonucleotide
caaugugccaucaagucaauu

SEQ ID NO: 9597 - RNA, 21 nt, Artificial Sequence
  Description of Artificial Sequence: Synthetic oligonucleotide
ugugccaucaagucacuaauu

SEQ ID NO: 9598 - RNA, 21 nt, Artificial Sequence
  Description of Artificial Sequence: Synthetic oligonucleotide
gugccaucaagucacuaaauu

SEQ ID NO: 9599 - RNA, 21 nt, Artificial Sequence
  Description of Artificial Sequence: Synthetic oligonucleotide
ugccaucaagucacuaagauu

SEQ ID NO: 9600 - RNA, 21 nt, Artificial Sequence
  Description of Artificial Sequence: Synthetic oligonucleotide
caucaagucacuaagucgauu

SEQ ID NO: 9601 - RNA, 21 nt, Artificial Sequence
  Description of Artificial Sequence: Synthetic oligonucleotide
ucauugguaucauguugcauu

SEQ ID NO: 9602 - RNA, 21 nt, Artificial Sequence
  Description of Artificial Sequence: Synthetic oligonucleotide
ccuauaugugccacggugauu

SEQ ID NO: 9603 - RNA, 21 nt, Artificial Sequence
  Description of Artificial Sequence: Synthetic oligonucleotide
cuauaugugccacggugaauu

SEQ ID NO: 9604 - RNA, 21 nt, Artificial Sequence
  Description of Artificial Sequence: Synthetic oligonucleotide
uauaugugccacggugacauu

SEQ ID NO: 9605 - RNA, 21 nt, Artificial Sequence
  Description of Artificial Sequence: Synthetic oligonucleotide
auaugugccacggugaccauu

SEQ ID NO: 9606 - RNA, 21 nt, Artificial Sequence
  Description of Artificial Sequence: Synthetic oligonucleotide
aaguuugugcacagggacauu

SEQ ID NO: 9607 - RNA, 21 nt, Artificial Sequence
  Description of Artificial Sequence: Synthetic oligonucleotide
gguggagcagauagugucauu

SEQ ID NO: 9608 - RNA, 21 nt, Artificial Sequence
  Description of Artificial Sequence: Synthetic oligonucleotide
agauagugucugcacugcauu

SEQ ID NO: 9609 - RNA, 21 nt, Artificial Sequence
  Description of Artificial Sequence: Synthetic oligonucleotide
uggggaccauuaugugcaauu

SEQ ID NO: 9610 - RNA, 21 nt, Artificial Sequence
  Description of Artificial Sequence: Synthetic oligonucleotide
gggaccauuaugugcagcauu

SEQ ID NO: 9611 - RNA, 21 nt, Artificial Sequence
  Description of Artificial Sequence: Synthetic oligonucleotide
ccagcaaccuacaugaacauu

SEQ ID NO: 9612 - RNA, 21 nt, Artificial Sequence
  Description of Artificial Sequence: Synthetic oligonucleotide
uuauggcuacaaacacagcuu

SEQ ID NO: 9613 - RNA, 21 nt, Artificial Sequence
  Description of Artificial Sequence: Synthetic oligonucleotide
ucguauggcuacaaacacauu

SEQ ID NO: 9614 - RNA, 21 nt, Artificial Sequence
  Description of Artificial Sequence: Synthetic oligonucleotide
uauugcguauggcuacaaauu

SEQ ID NO: 9615 - RNA, 21 nt, Artificial Sequence
  Description of Artificial Sequence: Synthetic oligonucleotide
ugauugcguauggcuacaauu

SEQ ID NO: 9616 - RNA, 21 nt, Artificial Sequence
  Description of Artificial Sequence: Synthetic oligonucleotide
ucgauugcguauggcuacauu

SEQ ID NO: 9617 - RNA, 21 nt, Artificial Sequence
  Description of Artificial Sequence: Synthetic oligonucleotide
uugcaggcgauugcguauguu

SEQ ID NO: 9618 - RNA, 21 nt, Artificial Sequence
  Description of Artificial Sequence: Synthetic oligonucleotide
ucuaggucaugcaggaagcuu

SEQ ID NO: 9619 - RNA, 21 nt, Artificial Sequence
  Description of Artificial Sequence: Synthetic oligonucleotide
uucuaggucaugcaggaaguu

SEQ ID NO: 9620 - RNA, 21 nt, Artificial Sequence
  Description of Artificial Sequence: Synthetic oligonucleotide
uuuauggugggcugagaaguu

SEQ ID NO: 9621 - RNA, 21 nt, Artificial Sequence
  Description of Artificial Sequence: Synthetic oligonucleotide
uccacguagaaauaggagguu

SEQ ID NO: 9622 - RNA, 21 nt, Artificial Sequence
  Description of Artificial Sequence: Synthetic oligonucleotide
ugauagacacugagcgugguu

SEQ ID NO: 9623 - RNA, 21 nt, Artificial Sequence
  Description of Artificial Sequence: Synthetic oligonucleotide
ugacgccugauagacacuguu

SEQ ID NO: 9624 - RNA, 21 nt, Artificial Sequence
  Description of Artificial Sequence: Synthetic oligonucleotide
ugagacgccugauagacacuu

SEQ ID NO: 9625 - RNA, 21 nt, Artificial Sequence
  Description of Artificial Sequence: Synthetic oligonucleotide
uugagacgccugauagacauu

SEQ ID NO: 9626 - RNA, 21 nt, Artificial Sequence
  Description of Artificial Sequence: Synthetic oligonucleotide
uuugagacgccugauagacuu

SEQ ID NO: 9627 - RNA, 21 nt, Artificial Sequence
  Description of Artificial Sequence: Synthetic oligonucleotide
ugccuugagacgccugauauu

SEQ ID NO: 9628 - RNA, 21 nt, Artificial Sequence
  Description of Artificial Sequence: Synthetic oligonucleotide
uagacaagaugcuugggcauu

SEQ ID NO: 9629 - RNA, 21 nt, Artificial Sequence
  Description of Artificial Sequence: Synthetic oligonucleotide
uacuguaggagacaagauguu

SEQ ID NO: 9630 - RNA, 21 nt, Artificial Sequence
  Description of Artificial Sequence: Synthetic oligonucleotide
ucaauacuguaggagacaauu

SEQ ID NO: 9631 - RNA, 21 nt, Artificial Sequence
  Description of Artificial Sequence: Synthetic oligonucleotide
uucaauacuguaggagacauu

SEQ ID NO: 9632 - RNA, 21 nt, Artificial Sequence
  Description of Artificial Sequence: Synthetic oligonucleotide
uauucaauacuguaggagauu

SEQ ID NO: 9633 - RNA, 21 nt, Artificial Sequence
  Description of Artificial Sequence: Synthetic oligonucleotide
uugugcacguauucaauacuu

SEQ ID NO: 9634 - RNA, 21 nt, Artificial Sequence
  Description of Artificial Sequence: Synthetic oligonucleotide
ugcugugcacguauucaauuu

SEQ ID NO: 9635 - RNA, 21 nt, Artificial Sequence
  Description of Artificial Sequence: Synthetic oligonucleotide
uagcugugcacguauucaauu

SEQ ID NO: 9636 - RNA, 21 nt, Artificial Sequence
  Description of Artificial Sequence: Synthetic oligonucleotide
ugaagcugugcacguauucuu

SEQ ID NO: 9637 - RNA, 21 nt, Artificial Sequence
  Description of Artificial Sequence: Synthetic oligonucleotide
ugcuguacagucaggaaguuu

SEQ ID NO: 9638 - RNA, 21 nt, Artificial Sequence
  Description of Artificial Sequence: Synthetic oligonucleotide
uagucacccaacucuggcuuu

SEQ ID NO: 9639 - RNA, 21 nt, Artificial Sequence
  Description of Artificial Sequence: Synthetic oligonucleotide
uaaucugcagucgaggaccuu

SEQ ID NO: 9640 - RNA, 21 nt, Artificial Sequence
  Description of Artificial Sequence: Synthetic oligonucleotide
uaaaucugcagucgaggacuu

SEQ ID NO: 9641 - RNA, 21 nt, Artificial Sequence
  Description of Artificial Sequence: Synthetic oligonucleotide
ucaaaucugcagucgaggauu

SEQ ID NO: 9642 - RNA, 21 nt, Artificial Sequence
  Description of Artificial Sequence: Synthetic oligonucleotide
ugcaaaucugcagucgagguu

SEQ ID NO: 9643 - RNA, 21 nt, Artificial Sequence
  Description of Artificial Sequence: Synthetic oligonucleotide
uggagcaaaucugcagucguu

SEQ ID NO: 9644 - RNA, 21 nt, Artificial Sequence
  Description of Artificial Sequence: Synthetic oligonucleotide
uuuuggagcaaaucugcaguu

SEQ ID NO: 9645 - RNA, 21 nt, Artificial Sequence
  Description of Artificial Sequence: Synthetic oligonucleotide
uuuuuggagcaaaucugcauu

SEQ ID NO: 9646 - RNA, 21 nt, Artificial Sequence
  Description of Artificial Sequence: Synthetic oligonucleotide
ucguuuuggagcaaaucuguu

SEQ ID NO: 9647 - RNA, 21 nt, Artificial Sequence
  Description of Artificial Sequence: Synthetic oligonucleotide
uuucacaacagcgcuccacuu

SEQ ID NO: 9648 - RNA, 21 nt, Artificial Sequence
  Description of Artificial Sequence: Synthetic oligonucleotide
uauucacaacagcgcuccauu

SEQ ID NO: 9649 - RNA, 21 nt, Artificial Sequence
  Description of Artificial Sequence: Synthetic oligonucleotide
uaguuuugagcuguccuuguu

SEQ ID NO: 9650 - RNA, 21 nt, Artificial Sequence
  Description of Artificial Sequence: Synthetic oligonucleotide
ucaaagucuuuccggggcauu

SEQ ID NO: 9651 - RNA, 21 nt, Artificial Sequence
  Description of Artificial Sequence: Synthetic oligonucleotide
uacaaagucuuuccggggcuu

SEQ ID NO: 9652 - RNA, 21 nt, Artificial Sequence
  Description of Artificial Sequence: Synthetic oligonucleotide
uuacaaagucuuuccgggguu

SEQ ID NO: 9653 - RNA, 21 nt, Artificial Sequence
  Description of Artificial Sequence: Synthetic oligonucleotide
ucuacaaagucuuuccggguu

SEQ ID NO: 9654 - RNA, 21 nt, Artificial Sequence
  Description of Artificial Sequence: Synthetic oligonucleotide
uacucaaacuccucuacaauu

SEQ ID NO: 9655 - RNA, 21 nt, Artificial Sequence
  Description of Artificial Sequence: Synthetic oligonucleotide
uguuagucacggugaggcuuu

SEQ ID NO: 9656 - RNA, 21 nt, Artificial Sequence
  Description of Artificial Sequence: Synthetic oligonucleotide
ucauguuagucacggugaguu

SEQ ID NO: 9657 - RNA, 21 nt, Artificial Sequence
  Description of Artificial Sequence: Synthetic oligonucleotide
ugcauguuagucacggugauu

SEQ ID NO: 9658 - RNA, 21 nt, Artificial Sequence
  Description of Artificial Sequence: Synthetic oligonucleotide
uggcauguuagucacgguguu

SEQ ID NO: 9659 - RNA, 21 nt, Artificial Sequence
  Description of Artificial Sequence: Synthetic oligonucleotide
uguugcacugcuaucagcauu

SEQ ID NO: 9660 - RNA, 21 nt, Artificial Sequence
  Description of Artificial Sequence: Synthetic oligonucleotide
uggccuucaagagugagacuu

SEQ ID NO: 9661 - RNA, 21 nt, Artificial Sequence
  Description of Artificial Sequence: Synthetic oligonucleotide
uucuggccuucaagagugauu

SEQ ID NO: 9662 - RNA, 21 nt, Artificial Sequence
  Description of Artificial Sequence: Synthetic oligonucleotide
ugucccauugaccagcacauu

SEQ ID NO: 9663 - RNA, 21 nt, Artificial Sequence
  Description of Artificial Sequence: Synthetic oligonucleotide
ucacucagucccauugaccuu

SEQ ID NO: 9664 - RNA, 21 nt, Artificial Sequence
  Description of Artificial Sequence: Synthetic oligonucleotide
ugacacucagucccauugauu

SEQ ID NO: 9665 - RNA, 21 nt, Artificial Sequence
  Description of Artificial Sequence: Synthetic oligonucleotide
uagacacucagucccauuguu

SEQ ID NO: 9666 - RNA, 21 nt, Artificial Sequence
  Description of Artificial Sequence: Synthetic oligonucleotide
ugcuagcagacacucagucuu

SEQ ID NO: 9667 - RNA, 21 nt, Artificial Sequence
  Description of Artificial Sequence: Synthetic oligonucleotide
uacauaaaagcugccccucuu

SEQ ID NO: 9668 - RNA, 21 nt, Artificial Sequence
  Description of Artificial Sequence: Synthetic oligonucleotide
uguggcacauaaaagcugcuu

SEQ ID NO: 9669 - RNA, 21 nt, Artificial Sequence
  Description of Artificial Sequence: Synthetic oligonucleotide
uguguggcacauaaaagcuuu

SEQ ID NO: 9670 - RNA, 21 nt, Artificial Sequence
  Description of Artificial Sequence: Synthetic oligonucleotide
uuagcacgacagggucuucuu

SEQ ID NO: 9671 - RNA, 21 nt, Artificial Sequence
  Description of Artificial Sequence: Synthetic oligonucleotide
uuuagcacgacagggucuuuu

SEQ ID NO: 9672 - RNA, 21 nt, Artificial Sequence
  Description of Artificial Sequence: Synthetic oligonucleotide
uguuggggcugaugcuuaguu

SEQ ID NO: 9673 - RNA, 21 nt, Artificial Sequence
  Description of Artificial Sequence: Synthetic oligonucleotide
uaguuggggcugaugcuuauu

SEQ ID NO: 9674 - RNA, 21 nt, Artificial Sequence
  Description of Artificial Sequence: Synthetic oligonucleotide
uguuagaugcuggccacaguu

SEQ ID NO: 9675 - RNA, 21 nt, Artificial Sequence
  Description of Artificial Sequence: Synthetic oligonucleotide
uuaagugccaugcugaaguuu

SEQ ID NO: 9676 - RNA, 21 nt, Artificial Sequence
  Description of Artificial Sequence: Synthetic oligonucleotide
uacuaagugccaugcugaauu

SEQ ID NO: 9677 - RNA, 21 nt, Artificial Sequence
  Description of Artificial Sequence: Synthetic oligonucleotide
ugcacuaagugccaugcuguu

SEQ ID NO: 9678 - RNA, 21 nt, Artificial Sequence
  Description of Artificial Sequence: Synthetic oligonucleotide
ugaaugacagcacuaaguguu

SEQ ID NO: 9679 - RNA, 21 nt, Artificial Sequence
  Description of Artificial Sequence: Synthetic oligonucleotide
ucgucauggaaugacagcauu

SEQ ID NO: 9680 - RNA, 21 nt, Artificial Sequence
  Description of Artificial Sequence: Synthetic oligonucleotide
ugcccgucauggaaugacauu

SEQ ID NO: 9681 - RNA, 21 nt, Artificial Sequence
  Description of Artificial Sequence: Synthetic oligonucleotide
uuaagcccgucauggaauguu

SEQ ID NO: 9682 - RNA, 21 nt, Artificial Sequence
  Description of Artificial Sequence: Synthetic oligonucleotide
ucuaagcccgucauggaauuu

SEQ ID NO: 9683 - RNA, 21 nt, Artificial Sequence
  Description of Artificial Sequence: Synthetic oligonucleotide
uuuaauggcaugcuccucauu

SEQ ID NO: 9684 - RNA, 21 nt, Artificial Sequence
  Description of Artificial Sequence: Synthetic oligonucleotide
uucaaacuuaauggcaugcuu

SEQ ID NO: 9685 - RNA, 21 nt, Artificial Sequence
  Description of Artificial Sequence: Synthetic oligonucleotide
uaccacucuacccaggauauu

SEQ ID NO: 9686 - RNA, 21 nt, Artificial Sequence
  Description of Artificial Sequence: Synthetic oligonucleotide
uaccaguagcugaagaccauu

SEQ ID NO: 9687 - RNA, 21 nt, Artificial Sequence
  Description of Artificial Sequence: Synthetic oligonucleotide
uguugggaggaagaacuaguu

SEQ ID NO: 9688 - RNA, 21 nt, Artificial Sequence
  Description of Artificial Sequence: Synthetic oligonucleotide
uguagucagagcccgaguauu

SEQ ID NO: 9689 - RNA, 21 nt, Artificial Sequence
  Description of Artificial Sequence: Synthetic oligonucleotide
uguagacaacuccaaaguguu

SEQ ID NO: 9690 - RNA, 21 nt, Artificial Sequence
  Description of Artificial Sequence: Synthetic oligonucleotide
uccuggucuauguauucucuu

SEQ ID NO: 9691 - RNA, 21 nt, Artificial Sequence
  Description of Artificial Sequence: Synthetic oligonucleotide
uauucugggccuggucuauuu

SEQ ID NO: 9692 - RNA, 21 nt, Artificial Sequence
  Description of Artificial Sequence: Synthetic oligonucleotide
uuggauucgauucugggccuu

SEQ ID NO: 9693 - RNA, 21 nt, Artificial Sequence
  Description of Artificial Sequence: Synthetic oligonucleotide
uauuggauucgauucuggguu

SEQ ID NO: 9694 - RNA, 21 nt, Artificial Sequence
  Description of Artificial Sequence: Synthetic oligonucleotide
uacauuggauucgauucuguu

SEQ ID NO: 9695 - RNA, 21 nt, Artificial Sequence
  Description of Artificial Sequence: Synthetic oligonucleotide
ucacauuggauucgauucuuu

SEQ ID NO: 9696 - RNA, 21 nt, Artificial Sequence
  Description of Artificial Sequence: Synthetic oligonucleotide
ugcacauuggauucgauucuu

SEQ ID NO: 9697 - RNA, 21 nt, Artificial Sequence
  Description of Artificial Sequence: Synthetic oligonucleotide
ugauggcacauuggauucguu

SEQ ID NO: 9698 - RNA, 21 nt, Artificial Sequence
  Description of Artificial Sequence: Synthetic oligonucleotide
uugauggcacauuggauucuu

SEQ ID NO: 9699 - RNA, 21 nt, Artificial Sequence
  Description of Artificial Sequence: Synthetic oligonucleotide
uugacuugauggcacauuguu

SEQ ID NO: 9700 - RNA, 21 nt, Artificial Sequence
  Description of Artificial Sequence: Synthetic oligonucleotide
uuagugacuugauggcacauu

SEQ ID NO: 9701 - RNA, 21 nt, Artificial Sequence
  Description of Artificial Sequence: Synthetic oligonucleotide
uuuagugacuugauggcacuu

SEQ ID NO: 9702 - RNA, 21 nt, Artificial Sequence
  Description of Artificial Sequence: Synthetic oligonucleotide
ucuuagugacuugauggcauu

SEQ ID NO: 9703 - RNA, 21 nt, Artificial Sequence
  Description of Artificial Sequence: Synthetic oligonucleotide
ucgacuuagugacuugauguu

SEQ ID NO: 9704 - RNA, 21 nt, Artificial Sequence
  Description of Artificial Sequence: Synthetic oligonucleotide
ugcaacaugauaccaaugauu

SEQ ID NO: 9705 - RNA, 21 nt, Artificial Sequence
  Description of Artificial Sequence: Synthetic oligonucleotide
ucaccguggcacauauagguu

SEQ ID NO: 9706 - RNA, 21 nt, Artificial Sequence
  Description of Artificial Sequence: Synthetic oligonucleotide
uucaccguggcacauauaguu

SEQ ID NO: 9707 - RNA, 21 nt, Artificial Sequence
  Description of Artificial Sequence: Synthetic oligonucleotide
ugucaccguggcacauauauu

SEQ ID NO: 9708 - RNA, 21 nt, Artificial Sequence
  Description of Artificial Sequence: Synthetic oligonucleotide
uggucaccguggcacauauuu

SEQ ID NO: 9709 - RNA, 21 nt, Artificial Sequence
  Description of Artificial Sequence: Synthetic oligonucleotide
ugucccugugcacaaacuuuu

SEQ ID NO: 9710 - RNA, 21 nt, Artificial Sequence
  Description of Artificial Sequence: Synthetic oligonucleotide
ugacacuaucugcuccaccuu

SEQ ID NO: 9711 - RNA, 21 nt, Artificial Sequence
  Description of Artificial Sequence: Synthetic oligonucleotide
ugcagugcagacacuaucuuu

SEQ ID NO: 9712 - RNA, 21 nt, Artificial Sequence
  Description of Artificial Sequence: Synthetic oligonucleotide
uugcacauaaugguccccauu

SEQ ID NO: 9713 - RNA, 21 nt, Artificial Sequence
  Description of Artificial Sequence: Synthetic oligonucleotide
ugcugcacauaauggucccuu

SEQ ID NO: 9714 - RNA, 21 nt, Artificial Sequence
  Description of Artificial Sequence: Synthetic oligonucleotide
uguucauguagguugcugguu

SEQ ID NO: 9715 - RNA, 21 nt, Artificial Sequence
  Description of Artificial Sequence: Synthetic oligonucleotide
gcuguguuuguagccauaauu

SEQ ID NO: 9716 - RNA, 21 nt, Artificial Sequence
  Description of Artificial Sequence: Synthetic oligonucleotide
uguguuuguagccauacgauu

SEQ ID NO: 9717 - RNA, 21 nt, Artificial Sequence
  Description of Artificial Sequence: Synthetic oligonucleotide
uuuguagccauacgcaauauu

SEQ ID NO: 9718 - RNA, 21 nt, Artificial Sequence
  Description of Artificial Sequence: Synthetic oligonucleotide
uuguagccauacgcaaucauu

SEQ ID NO: 9719 - RNA, 21 nt, Artificial Sequence
  Description of Artificial Sequence: Synthetic oligonucleotide
uguagccauacgcaaucgauu

SEQ ID NO: 9720 - RNA, 21 nt, Artificial Sequence
  Description of Artificial Sequence: Synthetic oligonucleotide
cauacgcaaucgccugcaauu

SEQ ID NO: 9721 - RNA, 21 nt, Artificial Sequence
  Description of Artificial Sequence: Synthetic oligonucleotide
gcuuccugcaugaccuagauu

SEQ ID NO: 9722 - RNA, 21 nt, Artificial Sequence
  Description of Artificial Sequence: Synthetic oligonucleotide
cuuccugcaugaccuagaauu

SEQ ID NO: 9723 - RNA, 21 nt, Artificial Sequence
  Description of Artificial Sequence: Synthetic oligonucleotide
cuucucagcccaccauaaauu

SEQ ID NO: 9724 - RNA, 21 nt, Artificial Sequence
  Description of Artificial Sequence: Synthetic oligonucleotide
ccuccuauuucuacguggauu

SEQ ID NO: 9725 - RNA, 21 nt, Artificial Sequence
  Description of Artificial Sequence: Synthetic oligonucleotide
ccacgcucagugucuaucauu

SEQ ID NO: 9726 - RNA, 21 nt, Artificial Sequence
  Description of Artificial Sequence: Synthetic oligonucleotide
cagugucuaucaggcgucauu

SEQ ID NO: 9727 - RNA, 21 nt, Artificial Sequence
  Description of Artificial Sequence: Synthetic oligonucleotide
gugucuaucaggcgucucauu

SEQ ID NO: 9728 - RNA, 21 nt, Artificial Sequence
  Description of Artificial Sequence: Synthetic oligonucleotide
ugucuaucaggcgucucaauu

SEQ ID NO: 9729 - RNA, 21 nt, Artificial Sequence
  Description of Artificial Sequence: Synthetic oligonucleotide
gucuaucaggcgucucaaauu

SEQ ID NO: 9730 - RNA, 21 nt, Artificial Sequence
  Description of Artificial Sequence: Synthetic oligonucleotide
uaucaggcgucucaaggcauu

SEQ ID NO: 9731 - RNA, 21 nt, Artificial Sequence
  Description of Artificial Sequence: Synthetic oligonucleotide
ugcccaagcaucuugucuauu

SEQ ID NO: 9732 - RNA, 21 nt, Artificial Sequence
  Description of Artificial Sequence: Synthetic oligonucleotide
caucuugucuccuacaguauu

SEQ ID NO: 9733 - RNA, 21 nt, Artificial Sequence
  Description of Artificial Sequence: Synthetic oligonucleotide
uugucuccuacaguauugauu

SEQ ID NO: 9734 - RNA, 21 nt, Artificial Sequence
  Description of Artificial Sequence: Synthetic oligonucleotide
ugucuccuacaguauugaauu

SEQ ID NO: 9735 - RNA, 21 nt, Artificial Sequence
  Description of Artificial Sequence: Synthetic oligonucleotide
ucuccuacaguauugaauauu

SEQ ID NO: 9736 - RNA, 21 nt, Artificial Sequence
  Description of Artificial Sequence: Synthetic oligonucleotide
guauugaauacgugcacaauu

SEQ ID NO: 9737 - RNA, 21 nt, Artificial Sequence
  Description of Artificial Sequence: Synthetic oligonucleotide
auugaauacgugcacagcauu

SEQ ID NO: 9738 - RNA, 21 nt, Artificial Sequence
  Description of Artificial Sequence: Synthetic oligonucleotide
uugaauacgugcacagcuauu

SEQ ID NO: 9739 - RNA, 21 nt, Artificial Sequence
  Description of Artificial Sequence: Synthetic oligonucleotide
gaauacgugcacagcuucauu

SEQ ID NO: 9740 - RNA, 21 nt, Artificial Sequence
  Description of Artificial Sequence: Synthetic oligonucleotide
acuuccugacuguacagcauu

SEQ ID NO: 9741 - RNA, 21 nt, Artificial Sequence
  Description of Artificial Sequence: Synthetic oligonucleotide
agccagaguugggugacuauu

SEQ ID NO: 9742 - RNA, 21 nt, Artificial Sequence
  Description of Artificial Sequence: Synthetic oligonucleotide
gguccucgacugcagauuauu

SEQ ID NO: 9743 - RNA, 21 nt, Artificial Sequence
  Description of Artificial Sequence: Synthetic oligonucleotide
guccucgacugcagauuuauu

SEQ ID NO: 9744 - RNA, 21 nt, Artificial Sequence
  Description of Artificial Sequence: Synthetic oligonucleotide
uccucgacugcagauuugauu

SEQ ID NO: 9745 - RNA, 21 nt, Artificial Sequence
  Description of Artificial Sequence: Synthetic oligonucleotide
ccucgacugcagauuugcauu

SEQ ID NO: 9746 - RNA, 21 nt, Artificial Sequence
  Description of Artificial Sequence: Synthetic oligonucleotide
cgacugcagauuugcuccauu

SEQ ID NO: 9747 - RNA, 21 nt, Artificial Sequence
  Description of Artificial Sequence: Synthetic oligonucleotide
cugcagauuugcuccaaaauu

SEQ ID NO: 9748 - RNA, 21 nt, Artificial Sequence
  Description of Artificial Sequence: Synthetic oligonucleotide
ugcagauuugcuccaaaaauu

SEQ ID NO: 9749 - RNA, 21 nt, Artificial Sequence
  Description of Artificial Sequence: Synthetic oligonucleotide
cagauuugcuccaaaacgauu

SEQ ID NO: 9750 - RNA, 21 nt, Artificial Sequence
  Description of Artificial Sequence: Synthetic oligonucleotide
guggagcgcuguugugaaauu

SEQ ID NO: 9751 - RNA, 21 nt, Artificial Sequence
  Description of Artificial Sequence: Synthetic oligonucleotide
uggagcgcuguugugaauauu

SEQ ID NO: 9752 - RNA, 21 nt, Artificial Sequence
  Description of Artificial Sequence: Synthetic oligonucleotide
caaggacagcucaaaacuauu

SEQ ID NO: 9753 - RNA, 21 nt, Artificial Sequence
  Description of Artificial Sequence: Synthetic oligonucleotide
ugccccggaaagacuuugauu

SEQ ID NO: 9754 - RNA, 21 nt, Artificial Sequence
  Description of Artificial Sequence: Synthetic oligonucleotide
gccccggaaagacuuuguauu

SEQ ID NO: 9755 - RNA, 21 nt, Artificial Sequence
  Description of Artificial Sequence: Synthetic oligonucleotide
ccccggaaagacuuuguaauu

SEQ ID NO: 9756 - RNA, 21 nt, Artificial Sequence
  Description of Artificial Sequence: Synthetic oligonucleotide
cccggaaagacuuuguagauu

SEQ ID NO: 9757 - RNA, 21 nt, Artificial Sequence
  Description of Artificial Sequence: Synthetic oligonucleotide
uuguagaggaguuugaguauu

SEQ ID NO: 9758 - RNA, 21 nt, Artificial Sequence
  Description of Artificial Sequence: Synthetic oligonucleotide
agccucaccgugacuaacauu

SEQ ID NO: 9759 - RNA, 21 nt, Artificial Sequence
  Description of Artificial Sequence: Synthetic oligonucleotide
cucaccgugacuaacaugauu

SEQ ID NO: 9760 - RNA, 21 nt, Artificial Sequence
  Description of Artificial Sequence: Synthetic oligonucleotide
ucaccgugacuaacaugcauu

SEQ ID NO: 9761 - RNA, 21 nt, Artificial Sequence
  Description of Artificial Sequence: Synthetic oligonucleotide
caccgugacuaacaugccauu

SEQ ID NO: 9762 - RNA, 21 nt, Artificial Sequence
  Description of Artificial Sequence: Synthetic oligonucleotide
ugcugauagcagugcaacauu

SEQ ID NO: 9763 - RNA, 21 nt, Artificial Sequence
  Description of Artificial Sequence: Synthetic oligonucleotide
gucucacucuugaaggccauu

SEQ ID NO: 9764 - RNA, 21 nt, Artificial Sequence
  Description of Artificial Sequence: Synthetic oligonucleotide
ucacucuugaaggccagaauu

SEQ ID NO: 9765 - RNA, 21 nt, Artificial Sequence
  Description of Artificial Sequence: Synthetic oligonucleotide
ugugcuggucaaugggacauu

SEQ ID NO: 9766 - RNA, 21 nt, Artificial Sequence
  Description of Artificial Sequence: Synthetic oligonucleotide
ggucaaugggacugagugauu

SEQ ID NO: 9767 - RNA, 21 nt, Artificial Sequence
  Description of Artificial Sequence: Synthetic oligonucleotide
ucaaugggacugagugucauu

SEQ ID NO: 9768 - RNA, 21 nt, Artificial Sequence
  Description of Artificial Sequence: Synthetic oligonucleotide
caaugggacugagugucuauu

SEQ ID NO: 9769 - RNA, 21 nt, Artificial Sequence
  Description of Artificial Sequence: Synthetic oligonucleotide
gacugagugucugcuagcauu

SEQ ID NO: 9770 - RNA, 21 nt, Artificial Sequence
  Description of Artificial Sequence: Synthetic oligonucleotide
gaggggcagcuuuuauguauu

SEQ ID NO: 9771 - RNA, 21 nt, Artificial Sequence
  Description of Artificial Sequence: Synthetic oligonucleotide
gcagcuuuuaugugccacauu

SEQ ID NO: 9772 - RNA, 21 nt, Artificial Sequence
  Description of Artificial Sequence: Synthetic oligonucleotide
agcuuuuaugugccacacauu

SEQ ID NO: 9773 - RNA, 21 nt, Artificial Sequence
  Description of Artificial Sequence: Synthetic oligonucleotide
gaagacccugucgugcuaauu

SEQ ID NO: 9774 - RNA, 21 nt, Artificial Sequence
  Description of Artificial Sequence: Synthetic oligonucleotide
aagacccugucgugcuaaauu

SEQ ID NO: 9775 - RNA, 21 nt, Artificial Sequence
  Description of Artificial Sequence: Synthetic oligonucleotide
cuaagcaucagccccaacauu

SEQ ID NO: 9776 - RNA, 21 nt, Artificial Sequence
  Description of Artificial Sequence: Synthetic oligonucleotide
uaagcaucagccccaacuauu

SEQ ID NO: 9777 - RNA, 21 nt, Artificial Sequence
  Description of Artificial Sequence: Synthetic oligonucleotide
cuguggccagcaucuaacauu

SEQ ID NO: 9778 - RNA, 21 nt, Artificial Sequence
  Description of Artificial Sequence: Synthetic oligonucleotide
acuucagcauggcacuuaauu

SEQ ID NO: 9779 - RNA, 21 nt, Artificial Sequence
  Description of Artificial Sequence: Synthetic oligonucleotide
uucagcauggcacuuaguauu

SEQ ID NO: 9780 - RNA, 21 nt, Artificial Sequence
  Description of Artificial Sequence: Synthetic oligonucleotide
cagcauggcacuuagugcauu

SEQ ID NO: 9781 - RNA, 21 nt, Artificial Sequence
  Description of Artificial Sequence: Synthetic oligonucleotide
cacuuagugcugucauucauu

SEQ ID NO: 9782 - RNA, 21 nt, Artificial Sequence
  Description of Artificial Sequence: Synthetic oligonucleotide
ugcugucauuccaugacgauu

SEQ ID NO: 9783 - RNA, 21 nt, Artificial Sequence
  Description of Artificial Sequence: Synthetic oligonucleotide
ugucauuccaugacgggcauu

SEQ ID NO: 9784 - RNA, 21 nt, Artificial Sequence
  Description of Artificial Sequence: Synthetic oligonucleotide
cauuccaugacgggcuuaauu

SEQ ID NO: 9785 - RNA, 21 nt, Artificial Sequence
  Description of Artificial Sequence: Synthetic oligonucleotide
auuccaugacgggcuuagauu

SEQ ID NO: 9786 - RNA, 21 nt, Artificial Sequence
  Description of Artificial Sequence: Synthetic oligonucleotide
ugaggagcaugccauuaaauu

SEQ ID NO: 9787 - RNA, 21 nt, Artificial Sequence
  Description of Artificial Sequence: Synthetic oligonucleotide
gcaugccauuaaguuugaauu

SEQ ID NO: 9788 - RNA, 21 nt, Artificial Sequence
  Description of Artificial Sequence: Synthetic oligonucleotide
uauccuggguagagugguauu

SEQ ID NO: 9789 - RNA, 21 nt, Artificial Sequence
  Description of Artificial Sequence: Synthetic oligonucleotide
uggucuucagcuacugguauu

SEQ ID NO: 9790 - RNA, 21 nt, Artificial Sequence
  Description of Artificial Sequence: Synthetic oligonucleotide
cuaguucuuccucccaacauu

SEQ ID NO: 9791 - RNA, 21 nt, Artificial Sequence
  Description of Artificial Sequence: Synthetic oligonucleotide
uacucgggcucugacuacauu

SEQ ID NO: 9792 - RNA, 21 nt, Artificial Sequence
  Description of Artificial Sequence: Synthetic oligonucleotide
cacuuuggaguugucuacauu

SEQ ID NO: 9793 - RNA, 21 nt, Artificial Sequence
  Description of Artificial Sequence: Synthetic oligonucleotide
gagaauacauagaccaggauu

SEQ ID NO: 9794 - RNA, 21 nt, Artificial Sequence
  Description of Artificial Sequence: Synthetic oligonucleotide
auagaccaggcccagaauauu

SEQ ID NO: 9795 - RNA, 21 nt, Artificial Sequence
  Description of Artificial Sequence: Synthetic oligonucleotide
ggcccagaaucgaauccaauu

SEQ ID NO: 9796 - RNA, 21 nt, Artificial Sequence
  Description of Artificial Sequence: Synthetic oligonucleotide
cccagaaucgaauccaauauu

SEQ ID NO: 9797 - RNA, 21 nt, Artificial Sequence
  Description of Artificial Sequence: Synthetic oligonucleotide
cagaaucgaauccaauguauu

SEQ ID NO: 9798 - RNA, 21 nt, Artificial Sequence
  Description of Artificial Sequence: Synthetic oligonucleotide
agaaucgaauccaaugugauu

SEQ ID NO: 9799 - RNA, 21 nt, Artificial Sequence
  Description of Artificial Sequence: Synthetic oligonucleotide
gaaucgaauccaaugugcauu

SEQ ID NO: 9800 - RNA, 21 nt, Artificial Sequence
  Description of Artificial Sequence: Synthetic oligonucleotide
cgaauccaaugugccaucauu

SEQ ID NO: 9801 - RNA, 21 nt, Artificial Sequence
  Description of Artificial Sequence: Synthetic oligonucleotide
gaauccaaugugccaucaauu

SEQ ID NO: 9802 - RNA, 21 nt, Artificial Sequence
  Description of Artificial Sequence: Synthetic oligonucleotide
caaugugccaucaagucaauu

SEQ ID NO: 9803 - RNA, 21 nt, Artificial Sequence
  Description of Artificial Sequence: Synthetic oligonucleotide
ugugccaucaagucacuaauu

SEQ ID NO: 9804 - RNA, 21 nt, Artificial Sequence
  Description of Artificial Sequence: Synthetic oligonucleotide
gugccaucaagucacuaaauu

SEQ ID NO: 9805 - RNA, 21 nt, Artificial Sequence
  Description of Artificial Sequence: Synthetic oligonucleotide
ugccaucaagucacuaagauu

SEQ ID NO: 9806 - RNA, 21 nt, Artificial Sequence
  Description of Artificial Sequence: Synthetic oligonucleotide
caucaagucacuaagucgauu

SEQ ID NO: 9807 - RNA, 21 nt, Artificial Sequence
  Description of Artificial Sequence: Synthetic oligonucleotide
ucauugguaucauguugcauu

SEQ ID NO: 9808 - RNA, 21 nt, Artificial Sequence
  Description of Artificial Sequence: Synthetic oligonucleotide
ccuauaugugccacggugauu

SEQ ID NO: 9809 - RNA, 21 nt, Artificial Sequence
  Description of Artificial Sequence: Synthetic oligonucleotide
cuauaugugccacggugaauu

SEQ ID NO: 9810 - RNA, 21 nt, Artificial Sequence
  Description of Artificial Sequence: Synthetic oligonucleotide
uauaugugccacggugacauu

SEQ ID NO: 9811 - RNA, 21 nt, Artificial Sequence
  Description of Artificial Sequence: Synthetic oligonucleotide
auaugugccacggugaccauu

SEQ ID NO: 9812 - RNA, 21 nt, Artificial Sequence
  Description of Artificial Sequence: Synthetic oligonucleotide
aaguuugugcacagggacauu

SEQ ID NO: 9813 - RNA, 21 nt, Artificial Sequence
  Description of Artificial Sequence: Synthetic oligonucleotide
gguggagcagauagugucauu

SEQ ID NO: 9814 - RNA, 21 nt, Artificial Sequence
  Description of Artificial Sequence: Synthetic oligonucleotide
agauagugucugcacugcauu

SEQ ID NO: 9815 - RNA, 21 nt, Artificial Sequence
  Description of Artificial Sequence: Synthetic oligonucleotide
uggggaccauuaugugcaauu

SEQ ID NO: 9816 - RNA, 21 nt, Artificial Sequence
  Description of Artificial Sequence: Synthetic oligonucleotide
gggaccauuaugugcagcauu

SEQ ID NO: 9817 - RNA, 21 nt, Artificial Sequence
  Description of Artificial Sequence: Synthetic oligonucleotide
ccagcaaccuacaugaacauu

SEQ ID NO: 9818 - DNA, 4772 bp, Homo sapiens
agtgtacagcggcggctggggcggcaggtgaggcggctggggcgttgctgtcgtgcgtccgcaggcgtcaggtgctcagacccgagggccgggaagggatttgggtttcacaggaacctggggcgggggtccgctatcttggggctgtcgggaccgctgcttaaatttggcccagtccagacctcgagtcgggcccccagccaggcccacgcccaggtccaggcccaggccggtagggatcctctagggtcccagctcgcctcgatggagctcctcccgccgctgcctcagtccttcctgttgctgctgctgttgcctgccaagcccgcggcgggcgaggactggcagtgcccgcgcaccccctacgcggcctctcgcgactttgacgtgaagtacgtggtgcccagcttctccgccggaggcctggtacaggccatggtgacctacgagggcgacagaaatgagagtgctgtgtttgtagccatacgcaatcgcctgcatgtgcttgggcctgacctgaagtctgtccagagcctggccacgggccctgctggagaccctggctgccagacgtgtgcagcctgtggcccaggaccccacggccctcccggtgacacagacacaaaggtgctggtgctggatcccgcgctgcctgcgctggtcagttgtggctccagcctgcagggccgctgcttcctgcatgacctagagccccaagggacagccgtgcatctggcagcgccagcctgcctcttctcagcccaccataaccggcccgatgactgccccgactgtgtggccagcccattgggcacccgtgtaactgtggttgagcaaggccaggcctcctatttctacgtggcatcctcactggacgcagccgtggctgccagcttcagcccacgctcagtgtctatcaggcgtctcaaggctgacgcctcgggattcgcaccgggctttgtggcgttgtcagtgctgcccaagcatcttgtctcctacagtattgaatacgtgcacagcttccacacgggagccttcgtatacttcctgactgtacagccggccagcgtgacagatgatcctagtgccctgcacacacgcctggcacggcttagcgccactgagccagagttgggtgactatcgggagctggtcctcgactgcagatttgctccaaaacgcaggcgccggggggccccagaaggcggacagccctaccctgtgctgcgggtggcccactccgctccagtgggtgcccaacttgccactgagctgagcatcgccgagggccaggaagtactatttggggtctttgtgactggcaaggatggtggtcctggcgtgggccccaactctgtcgtctgtgccttccccattgacctgctggacacactaattgatgagggtgtggagcgctgttgtgaatccccagtccatccaggcctccggcgaggcctcgacttcttccagtcgcccagtttttgccccaacccgcctggcctggaagccctcagccccaacaccagctgccgccacttccctctgctggtcagtagcagcttctcacgtgtggacctattcaatgggctgttgggaccagtacaggtcactgcattgtatgtgacacgccttgacaacgtcacagtggcacacatgggcacaatggatgggcgtatcctgcaggtggagctggtcaggtcactaaactacttgctgtatgtgtccaacttctcactgggtgacagtgggcagcccgtgcagcgggatgtcagtcgtcttggggaccacctactctttgcctctggggaccaggttttccaggtacctatccaaggccctggctgccgccacttcctgacctgtgggcgttgcctaagggcatggcatttcatgggctgtggctggtgtgggaacatgtgcggccagcagaaggagtgtcctggctcctggcaacaggaccactgcccacctaagcttactgagttccacccccacagtggacctctaaggggcagtacaaggctgaccctgtgtggctccaacttctaccttcacccttctggtctggtgcctgagggaacccatcaggtcactgtgggccaaagtccctgccggccactgcccaaggacagctcaaaactcagaccagtgccccggaaagactttgtagaggagtttgagtgtgaactggagcccttgggcacccaggcagtggggcctaccaacgtcagcctcaccgtgactaacatgccaccgggcaagcacttccgggtagacggcacctccgtgctgagaggcttctctttcatggagccagtgctgatagcagtgcaacccctctttggcccacgggcaggaggcacctgtctcactcttgaaggccagagtctgtctgtaggcaccagccgggctgtgctggtcaatgggactgagtgtctgctagcacgggtcagtgaggggcagcttttatgtgccacaccccctggggccacggtggccagtgtcccccttagcctgcaggtggggggtgcccaggtacctggttcctggaccttccagtacagagaagaccctgtcgtgctaagcatcagccccaactgtggctacatcaactcccacatcaccatctgtggccagcatctaacttcagcatggcacttagtgctgtcattccatgacgggcttagggcagtggaaagcaggtgtgagaggcagcttccagagcagcagctgtgccgccttcctgaatatgtggtccgagacccccagggatgggtggcagggaatctgagtgcccgaggggatggagctgctggctttacactgcctggctttcgcttcctacccccaccccatccacccagtgccaacctagttccactgaagcctgaggagcatgccattaagtttgagtatattgggctgggcgctgtggctgactgtgtgggtatcaacgtgaccgtgggtggtgagagctgccagcacgagttccggggggacatggttgtctgccccctgcccccatccctgcagcttggccaggatggtgccccattgcaggtctgcgtagatggtgaatgtcatatcctgggtagagtggtgcggccagggccagatggggtcccacagagcacgctccttggtatcctgctgcctttgctgctgcttgtggctgcactggcgactgcactggtcttcagctactggtggcggaggaagcagctagttcttcctcccaacctgaatgacctggcatccctggaccagactgctggagccacacccctgcctattctgtactcgggctctgactacagaagtggccttgcactccctgccattgatggtctggattccaccacttgtgtccatggagcatccttctccgatagtgaagatgaatcctgtgtgccactgctgcggaaagagtccatccagctaagggacctggactctgcgctcttggctgaggtcaaggatgtgctgattccccatgagcgggtggtcacccacagtgaccgagtcattggcaaaggccactttggagttgtctaccacggagaatacatagaccaggcccagaatcgaatccaatgtgccatcaagtcactaagtcgcatcacagagatgcagcaggtggaggccttcctgcgagaggggctgctcatgcgtggcctgaaccacccgaatgtgctggctctcattggtatcatgttgccacctgagggcctgccccatgtgctgctgccctatatgtgccacggtgacctgctccagttcatccgctcacctcagcggaaccccaccgtgaaggacctcatcagctttggcctgcaggtagcccgcggcatggagtacctggcagagcagaagtttgtgcacagggacctggctgcgcggaactgcatgctggacgagtcattcacagtcaaggtggctgactttggtttggcccgcgacatcctggacagggagtactatagtgttcaacagcatcgccacgctcgcctacctgtgaagtggatggcgctggagagcctgcagacctatagatttaccaccaagtctgatgtgtggtcatttggtgtgctgctgtgggaactgctgacacggggtgccccaccataccgccacattgacccttttgaccttacccacttcctggcccagggtcggcgcctgccccagcctgagtattgccctgattctctgtaccaagtgatgcagcaatgctgggaggcagacccagcagtgcgacccaccttcagagtactagtgggggaggtggagcagatagtgtctgcactgcttggggaccattatgtgcagctgccagcaacctacatgaacttgggccccagcacctcgcatgagatgaatgtgcgtccagaacagccgcagttctcacccatgccagggaatgtacgccggccccggccactctcagagcctcctcggcccacttgacttagttcttgggctggacctgcttagctgccttgagctaaccccaagctgcctctgggccatgccaggccagagggcagtggccctccaccttgttcctgccctttaactttcagaggcaataggtaaatggggcccattaggtccctcactccacagagtgagccagtgagggcagtcctgcaacatgtatttatggagtgcctgctgtggaccctgtcttctgggcacagtggactcagcagtgaccacaccaacactgacccttgaaccaataaaggaacaaatgactattaaagcacaaa

SEQ ID NO: 9819 - RNA, 21 nt, Artificial Sequence
  Description of Artificial Sequence: Synthetic oligonucleotide
  modified_base (1)..(21): a, c, u, g, unknown or other
nnnnnnnnnnnnnnnnnnnnn

SEQ ID NO: 9820 - RNA, 21 nt, Artificial Sequence
  Description of Artificial Sequence: Synthetic oligonucleotide
  modified_base (1)..(21): a, c, u, g, unknown or other
nnnnnnnnnnnnnnnnnnnnn

SEQ ID NO: 9821 - RNA, 21 nt, Artificial Sequence
  Description of Artificial Sequence: Synthetic oligonucleotide
  modified_base (1)..(21): a, c, u, g, unknown or other
nnnnnnnnnnnnnnnnnnnnn

SEQ ID NO: 9822 - RNA, 22 nt, Artificial Sequence
  Description of Artificial Sequence: Synthetic oligonucleotide
  modified_base (1)..(22): a, c, u, g, unknown or other
nnnnnnnnnnnnnnnnnnnnnn

SEQ ID NO: 9823 - RNA, 22 nt, Artificial Sequence
  Description of Artificial Sequence: Synthetic oligonucleotide
  modified_base (1)..(22): a, c, u, g, unknown or other
nnnnnnnnnnnnnnnnnnnnnn

SEQ ID NO: 9824 - RNA, 21 nt, Artificial Sequence
  Description of Artificial Sequence: Synthetic oligonucleotide
  modified_base (1)..(21): a, c, u, g, unknown or other
nnnnnnnnnnnnnnnnnnnnn

SEQ ID NO: 9825 - RNA, 21 nt, Artificial Sequence
  Description of Artificial Sequence: Synthetic oligonucleotide
  modified_base (1)..(21): a, c, u, g, unknown or other
nnnnnnnnnnnnnnnnnnnnn

SEQ ID NO: 9826 - RNA, 21 nt, Artificial Sequence
  Description of Artificial Sequence: Synthetic oligonucleotide
  modified_base (1)..(21): a, c, u, g, unknown or other
nnnnnnnnnnnnnnnnnnnnn

SEQ ID NO: 9827 - RNA, 21 nt, Artificial Sequence
  Description of Artificial Sequence: Synthetic oligonucleotide
  modified_base (1)..(21): a, c, u, g, unknown or other
nnnnnnnnnnnnnnnnnnnnn

SEQ ID NO: 9828 - RNA, 21 nt, Artificial Sequence
  Description of Artificial Sequence: Synthetic oligonucleotide
  modified_base (1)..(21): a, c, u, g, unknown or other
nnnnnnnnnnnnnnnnnnnnn

SEQ ID NO: 9829 - RNA, 21 nt, Artificial Sequence
  Description of Artificial Sequence: Synthetic oligonucleotide
  modified_base (1)..(21): a, c, u, g, unknown or other
nnnnnnnnnnnnnnnnnnnnn

SEQ ID NO: 9830 - RNA, 21 nt, Artificial Sequence
  Description of Artificial Sequence: Synthetic oligonucleotide
  modified_base (1)..(21): a, c, u, g, unknown or other
nnnnnnnnnnnnnnnnnnnnn

SEQ ID NO: 9831 - RNA, 21 nt, Artificial Sequence
  Description of Artificial Sequence: Synthetic oligonucleotide
  modified_base (1)..(21): a, c, u, g, unknown or other
nnnnnnnnnnnnnnnnnnnnn

SEQ ID NO: 9832 - RNA, 21 nt, Artificial Sequence
  Description of Artificial Sequence: Synthetic oligonucleotide
  modified_base (1)..(21): a, c, u, g, unknown or other
nnnnnnnnnnnnnnnnnnnnn

SEQ ID NO: 9833 - RNA, 21 nt, Artificial Sequence
  Description of Artificial Sequence: Synthetic oligonucleotide
  modified_base (1)..(21): a, c, u, g, unknown or other
nnnnnnnnnnnnnnnnnnnnn

SEQ ID NO: 9834 - RNA, 21 nt, Artificial Sequence
  Description of Artificial Sequence: Synthetic oligonucleotide
  modified_base (1)..(21): a, c, u, g, unknown or other
nnnnnnnnnnnnnnnnnnnnn

SEQ ID NO: 9835 - RNA, 21 nt, Artificial Sequence
  Description of Artificial Sequence: Synthetic oligonucleotide
  modified_base (1)..(21): a, c, u, g, unknown or other
nnnnnnnnnnnnnnnnnnnnn

SEQ ID NO: 9836 - DNA, 20 bp, Artificial Sequence
  Description of Artificial Sequence: Synthetic oligonucleotide
  Description of Combined DNA/RNA Molecule: Synthetic oligonucleotide
  modified_base (1)..(5): a, c, u, g, unknown or other
  modified_base (6)..(15): a, c, t, g, unknown or other
  modified_base (16)..(20): a, c, u, g, unknown or other
nnnnnnnnnnnnnnnnnnnn

SEQ ID NO: 9837 - protein, 5 aa, Artificial Sequence
  Description of Artificial Sequence: Synthetic peptide
  MOD_RES (4)..(4): D-amino acid
RGDFC

SEQ ID NO: 9838 - protein, 5 aa, Artificial Sequence
  Description of Artificial Sequence: Synthetic peptide
  MOD_RES (4)..(4): D-amino acid
RGDFK

SEQ ID NO: 9839 - protein, 4 aa, Artificial Sequence
  Description of Artificial Sequence: Synthetic peptide
  MOD_RES (4)..(4): D-amino acid
RGDF
